(19) United States
(12) Patent Application Publication
(10) Pub. No.: US 2023/0035659 A1
(43) Pub. Date: Feb. 2, 2023

(54) Compositions and Methods for TTR Gene Editing and Treating ATTR Amyloidosis Comprising a Corticosteroid or Use Thereof

(71) Applicant: Intellia Therapeutics, Inc., Cambridge, MA (US)

(72) Inventors: Yong CHANG, Acton, MA (US); Seth C. ALEXANDER, Medford, MA (US); Kristy M. WOOD, Wellesley, MA (US); Arti Mahendra Prakash KANJOLIA, Malden, MA (US); Shobu ODATE, Arlington, MA (US); Jessica Lynn SEITZER, Windham, NH (US); Reynald Michael LESCARBEAU, Medford, MA (US); Walter STRAPPS, Dedham, MA (US)

(73) Assignee: Intellia Therapeutics, Inc., Cambridge, MA (US)

(21) Appl. No.: 17/486,758

(22) Filed: Sep. 27, 2021

Related U.S. Application Data
(63) Continuation of application No. PCT/US2020/025533, filed on Mar. 27, 2020.
(60) Provisional application No. 62/825,637, filed on Mar. 28, 2019.
(60) Provisional application No. 62/825,676, filed on Mar. 28, 2019.

(51) Int. Cl. A61K 48/00; A61K 31/573; A61K 45/06; C12N 15/90; C12N 15/88; C12N 9/22; A61P 25/00

(52) U.S. Cl. CPC A61K 48/005; A61K 31/573; A61K 45/06; C12N 15/907; C12N 15/88; B82Y 5/00; A61P 25/00; C12N 2310/20; C12N 2310/315; C12N 2320/31; C12N 9/22

(57) ABSTRACT

Compositions and methods for editing, e.g., introducing double-stranded breaks, within the TTR gene in combination with administration of a corticosteroid are provided. Compositions and methods for treating subjects having amyloidosis associated with transthyretin (ATTR), in which a guide RNA and a corticosteroid are administered, are provided.

[0001] This is a continuation application of International Application No. PCT/US2020/025533, filed on Mar. 27, 2020, which claims priority to U.S. Provisional Patent Application No. 62/825,676 filed Mar. 28, 2019 and U.S. Provisional Patent Application No. 62/825,637 filed Mar. 28, 2019, the contents of each of which are incorporated herein by reference in their entirety for all purposes.

[0002] The instant application contains a Sequence Listing which has been submitted electronically in ASCII format and is hereby incorporated by reference in its entirety. Said ASCII copy, created on Sep. 27, 2021, is named 2021-09-27_01155-0029-00US_ST25.txt and is 968 KB in size.

[0003] Transthyretin (TTR) is a protein produced by the TTR gene that normally functions to transport retinol and thyroxine throughout the body. TTR is predominantly synthesized in the liver, with small fractions being produced in the choroid plexus and retina. TTR normally circulates as a soluble tetrameric protein in the blood.

[0004] Pathogenic variants of TTR, which may disrupt tetramer stability, can be encoded by mutant alleles of the TTR gene. Mutant TTR may result in misfolded TTR, which may generate amyloids (i.e., aggregates of misfolded TTR protein). In some cases, pathogenic variants of TTR can lead to amyloidosis, or disease resulting from build-up of amyloids. For example, misfolded TTR monomers can polymerize into amyloid fibrils within tissues, such as the peripheral nerves, heart, and gastrointestinal tract. Amyloid plaques can also comprise wild-type TTR that has deposited on misfolded TTR.

[0005] Misfolding and deposition of wild-type TTR has also been observed in males aged 60 or more and is associated with heart rhythm problems, heart failure, and carpal tunnel.

[0006] Amyloidosis characterized by deposition of TTR may be referred to as “ATTR,” “TTR-related amyloidosis,” “TTR amyloidosis,” or “ATTR amyloidosis,” “ATTR familial amyloidosis” (when associated with a genetic mutation in a family), or “ATTRwt” or “wild-type ATTR” (when arising from misfolding and deposition of wild-type TTR).

[0007] ATTR can present with a wide spectrum of symptoms, and patients with different classes of ATTR may have different characteristics and prognoses. Some classes of ATTR include familial amyloid polyneuropathy (FAP), familial amyloid cardiomyopathy (FAC), and wild-type TTR amyloidosis (wt-TTR amyloidosis). FAP commonly presents with sensorimotor neuropathy, while FAC and wt-TTR amyloidosis commonly present with congestive heart failure. FAP and FAC are usually associated with a genetic mutation in the FIR gene, and more than 100 different mutations in the TTR gene have been associated with ATTR. In contrast, wt-TTR amyloidosis is associated with aging and not with a genetic mutation in TTR. It is estimated that approximately 50,000 patients worldwide may be affected by FAP and FAC.

[0008] While more than 100 mutations in TTR are associated with ATTR, certain mutations have been more closely associated with neuropathy and/or cardiomyopathy. For example, mutations at T60 of TTR are associated with both cardiomyopathy and neuropathy; mutations at V30 are more associated with neuropathy; and mutations at V122 are more associated with cardiomyopathy.

[0009] A range of treatment approaches have been studied for treatment of ATTR, but there are no approved drugs that stop disease progression and improve quality of life. While liver transplant has been studied for treatment of ATTR, its use is declining as it involves significant risk and disease progression sometimes continues after transplantation. Small molecule stabilizers, such as diflunisal and tafamidis, appear to slow ATTR progression, but these agents do not halt disease progression.

[0010] Approaches using small interfering RNA (siRNA) knockdown, antisense knockdown, or a monoclonal antibody targeting amyloid fibrils for destruction are also currently being investigated, but while results on short-term suppression of TTR expression show encouraging preliminary data, a need exists for treatments that can produce long-lasting suppression of TTR.

[0011] Administration of foreign RNA can cause innate immune responses which are undesirable in the context of gene editing and therapy. Accordingly, the present disclosure provides compositions and methods for gene editing that may reduce inflammation or immune responses. For example, coadministration of corticosteroids to subjects receiving guide RNAs may reduce such inflammation or immune responses.

[0012] Accordingly, the following embodiments are provided. In some embodiments, the present invention provides compositions and methods using a corticosteroid in combination with a guide RNA and optionally an RNA-guided DNA binding agent such as the CRISPR/Cas system to substantially reduce or knockout expression of the TTR gene, thereby substantially reducing or eliminating the production of TTR protein associated with ATTR. The substantial reduction or elimination of the production of TTR protein associated with ATTR through alteration of the TTR gene can be a long-term reduction or elimination.

### SUMMARY

[0013] The following embodiments are provided herein.

[0014] Embodiment 1 is a method of treating amyloidosis associated with TTR (ATTR), comprising administering a corticosteroid and a composition to a subject in need thereof, wherein the composition comprises (i) an RNA-guided DNA binding agent or a nucleic acid encoding an RNA-guided DNA binding agent and (ii) a guide RNA comprising:
[0015] a. a guide sequence selected from SEQ ID NOs: 5-82;
[0016] b. at least 17, 18, 19, or 20 contiguous nucleotides of a sequence selected from SEQ ID NOs: 5-82; or
[0017] c. a guide sequence that is at least 99%, 98%, 97%, 96%, 95%, 94%, 93%, 92%, 91%, or 90% identical to a sequence selected from SEQ ID NOs: 5-82, thereby treating ATTR.

[0018] Embodiment 2 is a method of reducing TTR serum concentration, comprising administering a corticosteroid and a composition to a subject in need thereof, wherein the composition comprises (i) an RNA-guided DNA binding agent or a nucleic acid encoding an RNA-guided DNA binding agent and (ii) a guide RNA comprising:
[0019] a. a guide sequence selected from SEQ ID NOs: 5-82;
[0020] b. at least 17, 18, 19, or 20 contiguous nucleotides of a sequence selected from SEQ ID NOs: 5-82; or
[0021] c. a guide sequence that is at least 99%, 98%, 97%, 96%, 95%, 94%, 93%, 92%, 91%, or 90% identical to a sequence selected from SEQ ID NOs: 5-82,

[0022] thereby reducing TTR serum concentration.

[0023] Embodiment 3 is a method for reducing or preventing the accumulation of amyloids or amyloid fibrils comprising TTR in a subject, comprising administering a corticosteroid and a composition to a subject in need thereof, wherein the composition comprises (i) an RNA-guided DNA binding agent or a nucleic acid encoding an RNA-guided DNA binding agent and (ii) a guide RNA comprising:
[0024] a. a guide sequence selected from SEQ ID NOs: 5-82;
[0025] b. at least 17, 18, 19, or 20 contiguous nucleotides of a sequence selected from SEQ ID NOs: 5-82; or
[0026] c. a guide sequence that is at least 99%, 98%, 97%, 96%, 95%, 94%, 93%, 92%, 91%, or 90% identical to a sequence selected from SEQ ID NOs: 5-82,
   thereby reducing accumulation of amyloids or amyloid fibrils.

[0027] Embodiment 4 is a composition comprising a guide RNA comprising:
[0028] a. a guide sequence selected from SEQ ID NOs: 5-82;
[0029] b. at least 17, 18, 19, or 20 contiguous nucleotides of a sequence selected from SEQ ID NOs: 5-82; or
[0030] c. a guide sequence that is at least 99%, 98%, 97%, 96%, 95%, 94%, 93%, 92%, 91%, or 90% identical to a sequence selected from SEQ ID NOs: 5-82,
   for use in combination with a corticosteroid in a method of inducing a double-stranded break (DSB) within the TTR gene in a subject, modifying the TTR gene in a cell or subject, treating amyloidosis associated with TTR (ATTR) in a subject, reducing TTR serum concentration in a subject, and/or reducing or preventing the accumulation of amyloids or amyloid fibrils in a subject.

[0031] Embodiment 5 is a composition comprising a vector encoding a guide RNA, wherein the guide RNA comprises:
[0032] a. a guide sequence selected from SEQ ID NOs: 5-82;
[0033] b. at least 17, 18, 19, or 20 contiguous nucleotides of a sequence selected from SEQ ID NOs: 5-82; or
[0034] c. a guide sequence that is at least 99%, 98%, 97%, 96%, 95%, 94%, 93%, 92%, 91%, or 90% identical to a sequence selected from SEQ ID NOs: 5-82,
   for use in combination with a corticosteroid in a method of inducing a double-stranded break (DSB) within the TTR gene in a subject, modifying the TTR gene in a cell or subject, treating amyloidosis associated with TTR (ATTR) in a subject, reducing TTR serum concentration in a subject, and/or reducing or preventing the accumulation of amyloids or amyloid fibrils in a subject.

[0035] Embodiment 6 is a composition comprising:

(i) a guide RNA comprising:
[0036] a. a guide sequence selected from SEQ ID NOs: 5-82;
[0037] b. at least 17, 18, 19, or 20 contiguous nucleotides of a sequence selected from SEQ ID NOs: 5-82; or
[0038] c. a guide sequence that is at least 99%, 98%, 97%, 96%, 95%, 94%, 93%, 92%, 91%, or 90% identical to a sequence selected from SEQ ID NOs: 5-82, and
   (ii) an mRNA that encodes an RNA-guided DNA binding agent, wherein:
[0039] the open reading frame comprises a sequence with at least 95% identity to SEQ ID NO: 311;
[0040] the open reading frame has at least 95% identity to SEQ ID NO: 311 over at least its first 30, 50, 70, 100, 150, 200, 250, or 300 nucleotides;
[0041] the open reading frame consists of a set of codons of which at least 75% of the codons are codons listed in Table 1;
[0042] the open reading frame has an adenine content ranging from its minimum adenine content to 150% of the minimum adenine content; and/or
[0043] the open reading frame has an adenine dinucleotide content ranging from its minimum adenine dinucleotide content to 150% of the minimum adenine dinucleotide content;
   for use in combination with a corticosteroid in a method of inducing a double-stranded break (DSB) within the TTR gene in a subject, modifying the TTR gene in a cell or subject, treating amyloidosis associated with TTR (ATTR) in a subject, reducing TTR serum concentration in a subject, and/or reducing or preventing the accumulation of amyloids or amyloid fibrils in a subject.

[0044] Embodiment 7 is a composition comprising:

(i) a vector encoding a guide RNA, wherein the guide RNA comprises:
[0045] a. a guide sequence selected from SEQ ID NOs: 5-82;
[0046] b. at least 17, 18, 19, or 20 contiguous nucleotides of a sequence selected from SEQ ID NOs: 5-82; or
[0047] c. a guide sequence that is at least 99%, 98%, 97%, 96%, 95%, 94%, 93%, 92%, 91%, or 90% identical to a sequence selected from SEQ ID NOs: 5-82, and
   (ii) an mRNA that encodes an RNA-guided DNA binding agent, wherein:

[0048] the open reading frame comprises a sequence with at least 95% identity to SEQ ID NO: 311;
[0049] the open reading frame has at least 95% identity to SEQ ID NO: 311 over at least its first 30, 50, 70, 100, 150, 200, 250, or 300 nucleotides;
[0050] the open reading frame consists of a set of codons of which at least 75% of the codons are codons listed in Table 1;
[0051] the open reading frame has an adenine content ranging from its minimum adenine content to 150% of the minimum adenine content; and/or
[0052] the open reading frame has an adenine dinucleotide content ranging from its minimum adenine dinucleotide content to 150% of the minimum adenine dinucleotide content;
   for use in combination with a corticosteroid in a method of inducing a double-stranded break (DSB) within the TTR gene in a subject, modifying the TTR gene in a cell or subject, treating amyloidosis associated with TTR (ATTR) in a subject, reducing TTR serum concentration in a subject, and/or reducing or preventing the accumulation of amyloids or amyloid fibrils in a subject.

[0053] Embodiment 8 is the composition for use or method of any one of embodiments 1-3 or 5-7, wherein the method comprises administering the composition by infusion for more than 30 minutes, e.g. more than 60 minutes or more than 120 minutes.

[0054] Embodiment 9 is the composition or method of any one of the preceding embodiments, wherein the guide RNA comprises a guide sequence selected from SEQ ID NOs: 5-72, 74-78, and 80-82.

[0055] Embodiment 10 is the composition or method of any one of the preceding embodiments, wherein the guide RNA comprises a guide sequence selected from SEQ ID NOs: 5, 6, 7, 8, 9, 12, 13, 14, 15, 16, 17, 22, 23, 27, 29, 30, 35, 36, 37, 38, 55, 61, 63, 65, 66, 68, or 69.

[0056] Embodiment 11 is the composition of any one of embodiments 4-10, for use in inducing a double-stranded break (DSB) within the TTR gene in a cell or subject.

[0057] Embodiment 12 is the composition of any one of embodiments 4-11, for use in modifying the TTR gene in a cell or subject.

[0058] Embodiment 13 is the composition of any one of embodiments 4-12, for use in treating amyloidosis associated with TTR (ATTR) in a subject.

[0059] Embodiment 14 is the composition of any one of embodiments 4-13, for use in reducing TTR serum concentration in a subject.

[0060] Embodiment 15 is the composition of any one of embodiments 4-14, for use in reducing or preventing the accumulation of amyloids or amyloid fibrils in a subject.

[0061] Embodiment 16 is the method or composition for use of any one of the preceding embodiments, wherein the corticosteroid is dexamethasone, betamethasone, prednisone, prednisolone, methylprednisolone, cortisone, hydrocortisone, triamcinolone, or ethamethasoneb.

[0062] Embodiment 17 is the method or composition for use of any one of the preceding embodiments, wherein the corticosteroid is dexamethasone.

[0063] Embodiment 18 is the method or composition for use of any one of the preceding embodiments, wherein the corticosteroid is administered before the composition.

[0064] Embodiment 19 is the method or composition for use of any one of the preceding embodiments, wherein the corticosteroid is administered after the composition.

[0065] Embodiment 20 is the method or composition for use of any one of the preceding embodiments, wherein the corticosteroid is administered simultaneously with the composition.

[0066] Embodiment 21 is the method or composition for use of any one of the preceding embodiments, wherein the corticosteroid is administered about 5 minutes to within about 168 hours before the composition is administered.

[0067] Embodiment 22 is the method or composition for use of any one of the preceding embodiments, wherein the corticosteroid is administered about 5 minutes to within about 168 hours after the composition is administered.

[0068] Embodiment 23 is the method or composition for use of any one of the preceding embodiments, wherein the corticosteroid is administered 5 minutes, 10 minutes, 15 minutes, 30 minutes, 1 hour, 2 hours, 3 hours, 4 hours, 6 hours, 12 hours, 18 hours, 1 day, 1.5 days, 2 days, 3 days, 4 days, 5 days, 6 days, or one week before the composition is administered.

[0069] Embodiment 24 is the method or composition for use of any one of the preceding embodiments, wherein the corticosteroid is administered 5 minutes, 10 minutes, 15 minutes, 30 minutes, 1 hour, 2 hours, 3 hours, 4 hours, 6 hours, 12 hours, 18 hours, 1 day, 1.5 days, 2 days, 3 days, 4 days, 5 days, 6 days, or one week after the composition is administered.

[0070] Embodiment 25 is the method or composition for use of any one of the preceding embodiments, wherein at least two doses of the corticosteroid are administered before or after the administration of the composition.

[0071] Embodiment 26 is the method or composition for use of any one of the preceding embodiments, wherein at least two doses of the corticosteroid and at least two doses of the composition are administered.

[0072] Embodiment 27 is the method or composition for use of any one of the preceding embodiments, wherein the corticosteroid is administered to the subject at a dose of 0.75 mg to 20 mg.

[0073] Embodiment 28 is the method or composition for use of embodiment 27, wherein the corticosteroid is administered to the subject at a dose of about 0.01-0.4 mg/kg, such as 0.1-0.35 mg/kg or 0.25-0.35 mg/kg.

[0074] Embodiment 29 is the method or composition for use of any one of the preceding embodiments, wherein the corticosteroid is administered to the subject parenterally or by injection.

[0075] Embodiment 30 is the method or composition for use of any one of the preceding embodiments, wherein the corticosteroid is administered to the subject via an intravenous injection.

[0076] Embodiment 31 is the method or composition for use of any one of the preceding embodiments, wherein the corticosteroid is administered to the subject intramuscularly or by infusion.

[0077] Embodiment 32 is the method or composition for use of any one of embodiments 1-31, wherein the corticosteroid is administered to the subject orally.

[0078] Embodiment 33 is the method or composition for use of any one of embodiment 32, wherein the corticosteroid is administered to the subject orally before the composition is administered to the subject by intravenous injection.

[0079] Embodiment 34 is the method or composition for use of any one of embodiment 32, wherein the corticosteroid is administered to the subject orally after the composition is administered to the subject by intravenous injection.

[0080] Embodiment 35 is the method or composition for use of any one of embodiments 32 and 33, wherein the corticosteroid is dexamethasone, and the dexamethasone is administered to the subject orally in the amount of 20 mg 6 to 12 hour before the composition is administered to the subject.

[0081] Embodiment 36 is the method or composition for use of any one of embodiments 32, 33 or 35, wherein the corticosteroid is dexamethasone, and the dexamethasone is administered to the subject intravenously in the amount of 20 mg for 30 minutes 6 to 12 hour before the composition is administered to the subject.

[0082] Embodiment 37 is the method or composition for use of any one of the preceding embodiments, wherein the composition is administered by infusion for about 45-75 minutes, 75-105 minutes, 105-135 minutes, 135-165 minutes, 165-195 minutes, 195-225 minutes, 225-255 minutes, 255-285 minutes, 285-315 minutes, 315-345 minutes, or 345-375 minutes. In some embodiments, the composition is administered by infusion for about 1.5-6 hours.

[0083] Embodiment 38 is the method or composition for use of any one of the preceding embodiments, wherein the composition is administered by infusion for about 60 minutes, about 90 minutes, about 120 minutes, about 150 minutes, about 180 minutes, or about 240 minutes.

[0084] Embodiment 39 is the method or composition for use of any one of the preceding embodiments, wherein the composition is administered by infusion for about 120 minutes.

[0085] Embodiment 40 is the method or composition for use of any one of the preceding embodiments, wherein the corticosteroid is dexamethasone.

[0086] Embodiment 41 is the method or composition for use of any one of the preceding embodiments, wherein the method further comprises administering an infusion prophylaxis, wherein the infusion prophylaxis comprises one or more of acetaminophen, an H1 blocker, or an H2 blocker, optionally wherein the one or more of the acetaminophen, H1 blocker, or H2 blocker are concurrently administered with the corticosteroid and/or before the composition.

[0087] Embodiment 42 is the method or composition for use of embodiment 41, wherein each of the acetaminophen, H1 blocker, and H2 blocker are administered.

[0088] Embodiment 42a is the method or composition for use of embodiment 41 or 42, wherein the H1 blocker and/or the H2 blocker are administered orally.

[0089] Embodiment 42b is the method or composition for use of any one of embodiments 41-42a, wherein the infusion prophylaxis comprises an intravenous corticosteroid (such as dexamethasone 8-12 mg, or 10 mg or equivalent) and acetaminophen (such as oral acetaminophen 500 mg).

[0090] Embodiment 42c is the method or composition for use of any one of embodiments 41-42b, wherein the infusion prophylaxis is administered as a required premedication prior to administering a guide RNA-containing composition, e.g. an LNP composition.

[0091] Embodiment 43 is the method or composition for use of any one of embodiments 41-42c, wherein the H1 blocker is diphenhydramine.

[0092] Embodiment 44 is the method or composition for use of any one of embodiments 41-43, wherein the H2 blocker is ranitidine.

[0093] Embodiment 45 is the method or composition for use of any one of the preceding embodiments, wherein a first dose of the corticosteroid is administered at about 8-24 hours before the composition is administered and a second dose of the corticosteroid is administered at about 1-2 hours before the composition is administered.

[0094] Embodiment 46 is the method or composition for use of any one of the preceding embodiments, wherein a first dose of the corticosteroid is administered orally and a second dose of the corticosteroid is administered intravenously before the composition is administered.

[0095] Embodiment 47 is the method or composition for use of any one of embodiments 45 and 46, wherein the method further comprises administering one or more of acetaminophen, an H1 blocker, or an H2 blocker, optionally wherein the one or more of the acetaminophen, H1 blocker, or H2 blocker are concurrently administered with the second dose of the corticosteroid.

[0096] Embodiment 48 is the method or composition for use of any one of the preceding embodiments, wherein a first dose of the corticosteroid is administered orally at about 8-24 hours before the composition is administered and a second dose of the corticosteroid is administered intravenously at about 1-2 hours before the composition is administered.

[0097] Embodiment 49 is the method or composition for use of any one of the preceding embodiments, wherein a first dose of the corticosteroid is administered orally at about 8-24 hours before the composition is administered and a second dose of the corticosteroid is administered intravenously concurrently with administration of acetaminophen, H1 blocker and H2 blocker at about 1-2 hours before the composition is administered.

[0098] Embodiment 50 is the method or composition for use of any one of the preceding embodiments, wherein the corticosteroid is dexamethasone, and a first dose of dexamethasone in the amount of about 6-10 mg is administered to the subject orally at about 8-24 hours before the composition is administered to the subject, and a second dose of dexamethasone in the amount of about 8-12 mg is intravenously administered to the subject concurrently with oral administration of acetaminophen and intravenous administration of an H1 blocker and an H2 blocker, at about 1-2 hours before the composition is administered to the subject, optionally wherein the H1 blocker is diphenhydramine and the H2 blocker is ranitidine, and/or optionally wherein the subject is human.

[0099] Embodiment 51 is the method or composition for use of any one of the preceding embodiments, wherein the corticosteroid is dexamethasone, and a first dose of dexamethasone in the amount of 8 mg is administered to the subject orally at about 8-24 hours before the composition is administered to the subject, and a second dose of dexamethasone in the amount of 10 mg is intravenously administered to the subject concurrently with oral administration of acetaminophen and intravenous administration of an H1 blocker and an H2 blocker, at about 1-2 hours before the composition is administered to the subject, optionally wherein the H1 blocker is diphenhydramine and the H2 blocker is ranitidine.

[0100] Embodiment 52 is the method or composition for use of any one of the preceding embodiments, wherein the composition is administered in the amount of 3 mg/kg by infusion for about 1.5-6 hours; a first dose of the corticosteroid is administered orally at about 8-24 hours before infusion of the composition; and a second dose of the corticosteroid is administered intravenously at about 1-2 hours before infusion of the composition.

[0101] Embodiment 53 is the method or composition for use of any one of the preceding embodiments, wherein administering the corticosteroid improves tolerability of the composition comprising the guide RNA.

[0102] Embodiment 54 is the method or composition for use of any one of the preceding embodiments, wherein administering the corticosteroid reduces the incidence or severity of one or more of inflammation, nausea, vomiting, elevated ALT concentration in blood, hyperthermia, and/or hyperalgesia in response to the composition comprising the guide RNA.

[0103] Embodiment 55 is the method or composition for use of any one of the preceding embodiments, wherein administering the corticosteroid reduces or inhibits production or activity of one or more interferons and/or inflammatory cytokines in response to the composition comprising the guide RNA.

[0104] Embodiment 56 is the method or composition for use of any one of the preceding embodiments, wherein the composition reduces serum TTR levels.

[0105] Embodiment 57 is the method or composition for use of embodiment 56, wherein the serum TTR levels are reduced by at least 50% as compared to serum TTR levels before administration of the composition.

[0106] Embodiment 58 is the method or composition for use of embodiment 56, wherein the serum TTR levels are reduced by 50-60%, 60-70%, 70-80%, 80-90%, 90-95%, 95-98%, 98-99%, or 99-100% as compared to serum TTR levels before administration of the composition.

[0107] Embodiment 59 is the method or composition for use of any one of the preceding embodiments, wherein the composition results in editing of the TTR gene.

[0108] Embodiment 60 is the method or composition for use of embodiment 59, wherein the editing is calculated as a percentage of the population that is edited (percent editing).

[0109] Embodiment 61 is the method or composition for use of embodiment 60, wherein the percent editing is between 30 and 99% of the population.

[0110] Embodiment 62 is the method or composition for use of embodiment 61, wherein the percent editing is between 30 and 35%, 35 and 40%, 40 and 45%, 45 and 50%, 50 and 55%, 55 and 60%, 60 and 65%, 65 and 70%, 70 and 75%, 75 and 80%, 80 and 85%, 85 and 90%, 90 and 95%, or 95 and 99% of the population.

[0111] Embodiment 63 is the method or composition for use of any one of the preceding embodiments, wherein the composition reduces amyloid deposition in at least one tissue.

[0112] Embodiment 64 is the method or composition for use of embodiment 63, wherein the at least one tissue comprises one or more of stomach, colon, sciatic nerve, or dorsal root ganglion.

[0113] Embodiment 65 is the method or composition for use of any one of embodiments 63 and 64, wherein amyloid deposition is measured 8 weeks after administration of the composition.

[0114] Embodiment 66 is the method or composition for use of any one of embodiments 63-65, wherein amyloid deposition is compared to a negative control or a level measured before administration of the composition.

[0115] Embodiment 67 is the method or composition for use of any one of embodiments 63-66, wherein amyloid deposition is measured in a biopsy sample and/or by immunostaining.

[0116] Embodiment 68 is the method or composition for use of any one of embodiments 63-67, wherein amyloid deposition is reduced by between 30 and 35%, 35 and 40%, 40 and 45%, 45 and 50%, 50 and 55%, 55 and 60%, 60 and 65%, 65 and 70%, 70 and 75%, 75 and 80%, 80 and 85%, 85 and 90%, 90 and 95%, or 95 and 99% of the amyloid deposition seen in a negative control.

[0117] Embodiment 69 is the method or composition for use of any one of embodiments 63-68, wherein amyloid deposition is reduced by between 30 and 35%, 35 and 40%, 40 and 45%, 45 and 50%, 50 and 55%, 55 and 60%, 60 and 65%, 65 and 70%, 70 and 75%, 75 and 80%, 80 and 85%, 85 and 90%, 90 and 95%, or 95 and 99% of the amyloid deposition seen before administration of the composition.

[0118] Embodiment 70 is the method or composition for use of any one of the preceding embodiments, wherein the composition is administered or delivered at least two times.

[0119] Embodiment 71 is the method or composition for use of embodiment 70, wherein the composition is administered or delivered at least three times.

[0120] Embodiment 72 is the method or composition for use of embodiment 70, wherein the composition is administered or delivered at least four times.

[0121] Embodiment 73 is the method or composition for use of embodiment 70, wherein the composition is administered or delivered up to five, six, seven, eight, nine, or ten times.

[0122] Embodiment 74 is the method or composition for use of any one of embodiments 70-73, wherein the administration or delivery occurs at an interval of 1, 2, 3, 4, 5, 6, 7, 8, 9, 10, 11, 12, 13, 14, or 15 days.

[0123] Embodiment 75 is the method or composition for use of any one of embodiments 70-73, wherein the administration or delivery occurs at an interval of 1, 2, 3, 4, 5, 6, 7, 8, 9, 10, 11, 12, 13, 14, or 15 weeks.

[0124] Embodiment 76 is the method or composition for use of any one of embodiments 70-73, wherein the administration or delivery occurs at an interval of 1, 2, 3, 4, 5, 6, 7, 8, 9, 10, 11, 12, 13, 14, or 15 months.

[0125] Embodiment 77 is the method or composition of any one of the preceding embodiments, wherein the guide sequence is selected from SEQ ID NOs: 5-82.

[0126] Embodiment 78 is the method or composition of any one of the preceding embodiments, wherein the guide RNA is at least partially complementary to a target sequence present in the human TTR gene.

[0127] Embodiment 79 is the method or composition of embodiment 78, wherein the target sequence is in exon 1, 2, 3, or 4 of the human TTR gene.

[0128] Embodiment 80 is the method or composition of embodiment 78, wherein the target sequence is in exon 1 of the human TTR gene.

[0129] Embodiment 81 is the method or composition of embodiment 78, wherein the target sequence is in exon 2 of the human TTR gene.

[0130] Embodiment 82 is the method or composition of embodiment 78, wherein the target sequence is in exon 3 of the human TTR gene.

[0131] Embodiment 83 is the method or composition of embodiment 78, wherein the target sequence is in exon 4 of the human TTR gene.

[0132] Embodiment 84 is the method or composition for use of any one of the preceding embodiments, wherein the guide sequence is complementary to a target sequence in the positive strand of TTR.

[0133] Embodiment 85 is the method or composition of any one of embodiments 1-83, wherein the guide sequence is complementary to a target sequence in the negative strand of TTR.

[0134] Embodiment 86 is the method or composition of any one of embodiments 1-83, wherein the first guide sequence is complementary to a first target sequence in the positive strand of the TTR gene, and wherein the composition further comprises a second guide sequence that is complementary to a second target sequence in the negative strand of the TTR gene.

[0135] Embodiment 87 is the method or composition of any one of the preceding embodiments, wherein the guide RNA is a dual guide (dgRNA).

[0136] Embodiment 88 is the method or composition of any one of embodiments 1-86, wherein the guide RNA is a single guide (sgRNA).

[0137] Embodiment 89 is the method or composition of embodiment 88, wherein the sgRNA comprises any one of the guide sequences of SEQ ID NOs: 5-82 and nucleotides 21-100 of SEQ ID NO: 3.

[0138] Embodiment 90 is the method or composition of any one of embodiments 88 and 89, wherein the sgRNA comprises a guide sequence that is at least 99%, 98%, 97%, 96%, 95%, 94%, 93%, 92%, 91%, or 90% identical to a sequence selected from SEQ ID Nos: 87-124.

[0139] Embodiment 91 is the method or composition of embodiment 88, wherein the sgRNA comprises a sequence selected from SEQ ID Nos: 87-124.

[0140] Embodiment 92 is the method or composition of any one of the preceding embodiments, wherein the guide RNA comprises at least one modification.

[0141] Embodiment 93 is the method or composition of embodiment 92, wherein the at least one modification includes a 2′-O-methyl (2′-O-Me) modified nucleotide.

[0142] Embodiment 94 is the method or composition of embodiment 92 or 93, wherein the at least one modification includes a phosphorothioate (PS) bond between nucleotides.

[0143] Embodiment 95 is the method or composition of any one of embodiments 92-94, wherein the at least one modification includes a 2′-fluoro (2′-F) modified nucleotide.

[0144] Embodiment 96 is the method or composition of any one of embodiments 92-95, wherein the at least one modification includes a 5′ end modification, a 3′ end modification, or 5′ and 3′ end modifications.

[0145] Embodiment 97 is the method or composition of any one of embodiments 92-96, wherein the at least one modification includes a modification at one or more of the first five nucleotides at the 5′ end.

[0146] Embodiment 98 is the method or composition of any one of embodiments 92-97, wherein the at least one modification includes a modification at one or more of the last five nucleotides at the 3′ end.

[0147] Embodiment 99 is the method or composition of any one of embodiments 92-98, wherein the at least one modification includes PS bonds between the first four nucleotides.

[0148] Embodiment 100 is the method or composition of any one of embodiments 92-99, wherein the at least one modification includes PS bonds between the last four nucleotides.

[0149] Embodiment 101 is the method or composition of any one of embodiments 92-100, wherein the at least one modification includes 2′-O-Me modified nucleotides at the first three nucleotides at the 5′ end.

[0150] Embodiment 102 is the method or composition of any one of embodiments 92-101, wherein the at least one modification includes 2′-O-Me modified nucleotides at the last three nucleotides at the 3′ end.

[0151] Embodiment 103 is the method or composition of any one of embodiments 92-102, wherein the guide RNA comprises the modified nucleotides of SEQ ID NO: 3.

[0152] Embodiment 104 is the method or composition of any one of the preceding embodiments, wherein the composition further comprises a pharmaceutically acceptable excipient.

[0153] Embodiment 105 is the method or composition of any one of the preceding embodiments, wherein the guide RNA is associated with a lipid nanoparticle (LNP).

[0154] Embodiment 106 is the method or composition of embodiment 105, wherein the LNP comprises an ionizable lipid.

[0155] Embodiment 107 is the method or composition of embodiment 106, wherein the LNP comprises a biodegradable ionizable lipid.

[0156] Embodiment 108 is the method or composition of any one of embodiments 105-017, wherein the LNP comprises an amine lipid, e.g., a CCD lipid.

[0157] Embodiment 109 is the method or composition of any one of embodiments 105-108, wherein the LNP comprises a helper lipid.

[0158] Embodiment 110 is the method or composition of any one of embodiments 105-109, wherein the LNP comprises a stealth lipid, optionally wherein:

(i) the LNP comprises a lipid component and the lipid component comprises: about 50-60 mol-% amine lipid such as Lipid A, about 8-10 mol-% neutral lipid; and about 2.5-4 mol-% stealth lipid (e.g., a PEG lipid), wherein the remainder of the lipid component is helper lipid, and wherein the N/P ratio of the LNP composition is about 6;
(ii) the LNP comprises about 50-60 mol-% amine lipid such as Lipid A; about 27-39.5 mol-% helper lipid; about 8-10 mol-% neutral lipid; and about 2.5-4 mol-% stealth lipid (e.g., a PEG lipid), wherein the N/P ratio of the LNP composition is about 5-7 (e.g., about 6);
(iii) the LNP comprises a lipid component and the lipid component comprises: about 50-60 mol-% amine lipid such as Lipid A; about 5-15 mol-% neutral lipid; and about 2.5-4 mol-% Stealth lipid (e.g., a PEG lipid), wherein the remainder of the lipid component is helper lipid, and wherein the N/P ratio of the LNP composition is about 3-10;
(iv) the LNP comprises a lipid component and the lipid component comprises: about 40-60 mol-% amine lipid such as Lipid A; about 5-15 mol-% neutral lipid; and about 2.5-4 mol-% Stealth lipid (e.g., a PEG lipid), wherein the remainder of the lipid component is helper lipid, and wherein the N/P ratio of the LNP composition is about 6;
(v) the LNP comprises a lipid component and the lipid component comprises: about 50-60 mol-% amine lipid such as Lipid A; about 5-15 mol-% neutral lipid; and about 1.5-10 mol-% Stealth lipid (e.g., a PEG lipid), wherein the remainder of the lipid component is helper lipid, and wherein the N/P ratio of the LNP composition is about 6;
(vi) the LNP comprises a lipid component and the lipid component comprises: about 40-60 mol-% amine lipid such as Lipid A; about 0-10 mol-% neutral lipid; and about 1.5-10 mol-% Stealth lipid (e.g., a PEG lipid), wherein the remainder of the lipid component is helper lipid, and wherein the N/P ratio of the LNP composition is about 3-10;
(vii) the LNP comprises a lipid component and the lipid component comprises: about 40-60 mol-% amine lipid such as Lipid A; less than about 1 mol-% neutral lipid; and about 1.5-10 mol-% Stealth lipid (e.g., a PEG lipid), wherein the remainder of the lipid component is helper lipid, and wherein the N/P ratio of the LNP composition is about 3-10; (viii) the LNP comprises a lipid component and the lipid component comprises: about 40-60 mol-% amine lipid such as Lipid A; and about 1.5-10 mol-% Stealth lipid (e.g., a PEG lipid), wherein the remainder of the lipid component is helper lipid, wherein the N/P ratio of the LNP composition is about 3-10, and wherein the LNP composition is essentially free of or free of neutral phospholipid; or
(ix) the LNP comprises a lipid component and the lipid component comprises: about 50-60 mol-% amine lipid such as Lipid A; about 8-10 mol-% neutral lipid; and about 2.5-4 mol-% Stealth lipid (e.g., a PEG lipid), wherein the remainder of the lipid component is helper lipid, and wherein the N/P ratio of the LNP composition is about 3-7.

[0159] Embodiment 111 is the method or composition of any one of embodiments 105-110, wherein the LNP comprises a neutral lipid.

[0160] Embodiment 112 is the method or composition of any one of embodiments 105-111, wherein the amine lipid is present at about 50 mol-%.

[0161] Embodiment 113 is the method or composition of any one of embodiments 105-112, wherein the neutral lipid is present at about 9 mol-%.

[0162] Embodiment 114 is the method or composition of any one of embodiments 105-113, wherein the stealth lipid is present at about 3 mol-%.

[0163] Embodiment 115 is the method or composition of any one of embodiments 105-114, wherein the helper lipid is present at about 38 mol-%.

[0164] Embodiment 116 is the method or composition of any one of embodiments 105-115, wherein the N/P ratio of the LNP composition is about 6.

[0165] Embodiment 117 is the method or composition of any one of embodiments 105-116, wherein the LNP comprises a lipid component and the lipid component comprises: about 50 mol-% amine lipid such as Lipid A; about 9 mol-% neutral lipid such as DSPC; about 3 mol-% of stealth lipid such as a PEG lipid, such as PEG2k-DMG, and the remainder of the lipid component is helper lipid such as cholesterol wherein the N/P ratio of the LNP composition is about 6.

[0166] Embodiment 118 is the method or composition of any one of embodiments 105-117, wherein the amine lipid is Lipid A.

[0167] Embodiment 119 is the method or composition of any one of embodiments 105-118, wherein the neutral lipid is DSPC.

[0168] Embodiment 120 is the method or composition of any one of embodiments 105-119, wherein the stealth lipid is PEG2k-DMG.

[0169] Embodiment 121 is the method or composition of any one of embodiments 105-120, wherein the helper lipid is cholesterol.

[0170] Embodiment 122 is the method or composition of any one of embodiments 105-121, wherein the LNP comprises a lipid component and the lipid component comprises: about 50 mol-% Lipid A; about 9 mol-% DSPC; about 3 mol-% of PEG2k-DMG, and the remainder of the lipid component is cholesterol wherein the N/P ratio of the LNP composition is about 6.

[0171] Embodiment 123 is the method or composition of any one of the preceding embodiments, wherein the composition further comprises an RNA-guided DNA binding agent.

[0172] Embodiment 124 is the method or composition of any one of the preceding embodiments, wherein the composition further comprises a polynucleotide that encodes an RNA-guided DNA binding agent.

[0173] Embodiment 125 is the method or composition of embodiment 124, wherein the polynucleotide is an mRNA.

[0174] Embodiment 126 is the method or composition of any one of embodiments 123-125, wherein the RNA-guided DNA binding agent is a Cas cleavase.

[0175] Embodiment 127 is the method or composition of any one of embodiments 123-126, wherein the RNA-guided DNA binding agent is a Cas from a Type-II CRISPR/Cas system.

[0176] Embodiment 128 is the method or composition of any one of embodiments 123-127, wherein the RNA-guided DNA binding agent is a Cas9.

[0177] Embodiment 129 is the method or composition of embodiment 128, wherein the RNA-guided DNA binding agent is an S. pyogenes Cas9 nuclease.

[0178] Embodiment 130 is the method or composition of any one of embodiments 124-129, wherein the polynucleotide comprises an open reading frame encoding an RNA-guided DNA binding agent, wherein:
[0179] a. the open reading frame comprises a sequence with at least 95% identity to SEQ ID NO: 311;
[0180] b. the open reading frame has at least 95% identity to SEQ ID NO: 311 over at least its first 30, 50, 70, 100, 150, 200, 250, or 300 nucleotides;
[0181] c. the open reading frame consists of a set of codons of which at least 75% of the codons are codons listed in Table 4;
[0182] d. the open reading frame has an adenine content ranging from its minimum adenine content to 150% of the minimum adenine content; and/or
[0183] e. the open reading frame has an adenine dinucleotide content ranging from its minimum adenine dinucleotide content to 150% of the minimum adenine dinucleotide content.

[0184] Embodiment 131 is the composition or method of embodiment 130, wherein the open reading frame has at least 95% identity to SEQ ID NO: 311 over at least its first 10%, 12%, 15%, 20%, 25%, 30%, or 35% of its sequence.

[0185] Embodiment 132 is the composition or method of embodiment 130 or 131, wherein the open reading frame comprises a sequence with at least 95%, 96%, 97%, 98%, 99%, 99.5%, or 100% identity to SEQ ID NO: 311.

[0186] Embodiment 133 is the composition or method of any one of embodiments 130-132, wherein at least 75%, 80%, 85%, 90%, 95%, 98%, 99%, or 100% of the codons of the open reading frame are codons listed in Table 4.

[0187] Embodiment 134 is the composition or method of any one of embodiments 130-133, wherein the open reading frame has an adenine content ranging from its minimum adenine content to 101%, 102%, 103%, 105%, 110%, 115%, 120%, 125%, 130%, 135%, 140%, 145%, or 150% of the minimum adenine content.

[0188] Embodiment 135 is the composition or method of any one of embodiments 130-134, wherein the open reading frame has an adenine dinucleotide content ranging from its minimum adenine dinucleotide content to 101%, 102%, 103%, 105%, 110%, 115%, 120%, 125%, 130%, 135%, 140%, 145%, or 150% of the minimum adenine dinucleotide content.

[0189] Embodiment 136 is the composition or method of any one of embodiments 124-135, wherein the polynucleotide comprises a 5′ UTR with at least 90% identity to any one of SEQ ID NOs: 232, 234, 236, 238, 241, or 275-277.

[0190] Embodiment 137 is the composition or method of any one of embodiments 124-136, wherein the polynucleotide comprises a 3′ UTR with at least 90% identity to any one of SEQ ID NOs: 233, 235, 237, 239, or 240.

[0191] Embodiment 138 is the composition or method of any one of embodiments 124-137, wherein the polynucleotide comprises a 5′ UTR and a 3′ UTR from the same source.

[0192] Embodiment 139 is the composition or method of any one of embodiments 124-138, wherein the polynucleotide comprises a 5′ cap selected from Cap0, Cap1, and Cap2.

[0193] Embodiment 140 is the composition or method of any one of embodiments 124-139, wherein the open reading frame comprises a sequence with at least 95%, 96%, 97%, 98%, 99%, 99.5%, or 100% identity to SEQ ID NO: 311.

[0194] Embodiment 141 is the composition or method of any of embodiments 125-140, wherein at least 10% of the uridine in the mRNA is substituted with a modified uridine.

[0195] Embodiment 142 is the composition or method of embodiment 141, wherein the modified uridine is one or more of N1-methyl-pseudouridine, pseudouridine, 5-methoxyuridine, or 5-iodouridine.

[0196] Embodiment 143 is the composition or method of embodiment 141, wherein the modified uridine is one or both of N1-methyl-pseudouridine or 5-methoxyuridine.

[0197] Embodiment 144 is the composition or method of embodiment 141, wherein the modified uridine is N1-methyl-pseudouridine.

[0198] Embodiment 145 is the composition or method of embodiment 141, wherein the modified uridine is 5-methoxyuridine.

[0199] Embodiment 146 is the composition or method of any one of embodiments 141-145, wherein 15% to 45% of the uridine is substituted with the modified uridine.

[0200] Embodiment 147 is the composition or method of any one of embodiments 141-146, wherein at least 20% or at least 30% of the uridine is substituted with the modified uridine.

[0201] Embodiment 148 is the composition or method of embodiment 147, wherein at least 80% or at least 90% of the uridine is substituted with the modified uridine.

[0202] Embodiment 149 is the composition or method of embodiment 147, wherein 100% of the uridine is substituted with the modified uridine.

[0203] Embodiment 150 is the method or composition of any one of embodiments 123-149, wherein the RNA-guided DNA binding agent is modified.

[0204] Embodiment 151 is the method or composition of embodiment 150, wherein the modified RNA-guided DNA binding agent comprises a nuclear localization signal (NLS).

[0205] Embodiment 152 is the method or composition of any one of the preceding embodiments, wherein the composition is a pharmaceutical formulation and further comprises a pharmaceutically acceptable carrier.

[0206] Embodiment 153 is the method or composition for use of any one of the preceding embodiments, wherein the composition reduces or prevents amyloids or amyloid fibrils comprising TTR.

[0207] Embodiment 154 is the method or composition for use of embodiment 153, wherein the amyloids or amyloid fibrils are in the nerves, heart, or gastrointestinal track.

[0208] Embodiment 155 is the method or composition for use of any one of the preceding embodiments, wherein non-homologous ending joining (NHEJ) leads to a mutation during repair of a DSB in the TTR gene.

[0209] Embodiment 156 is the method or composition for use of embodiment 155, wherein NHEJ leads to a deletion or insertion of a nucleotide(s) during repair of a DSB in the TTR gene.

[0210] Embodiment 157 is the method or composition for use of embodiment 156, wherein the deletion or insertion of a nucleotide(s) induces a frame shift or nonsense mutation in the TTR gene.

[0211] Embodiment 158 is the method or composition for use of embodiment 155 or 156, wherein a frame shift or nonsense mutation is induced in the TTR gene of at least 50% of liver cells.

[0212] Embodiment 159 is the method or composition for use of embodiment 158, wherein a frame shift or nonsense mutation is induced in the TTR gene of 50%-60%, 60%-70%, 70% or 80%, 80%-90%, 90-95%, 95%-99%, or 99%-100% of liver cells.

[0213] Embodiment 160 is the method or composition for use of any one of embodiments 156-159, wherein a deletion or insertion of a nucleotide(s) occurs in the TTR gene at least 50-fold or more than in off-target sites.

[0214] Embodiment 161 is the method or composition for use of embodiment 160, wherein the deletion or insertion of a nucleotide(s) occurs in the TTR gene 50-fold to 150-fold, 150-fold to 500-fold, 500-fold to 1500-fold, 1500-fold to 5000-fold, 5000-fold to 15000-fold, 15000-fold to 30000-fold, or 30000-fold to 60000-fold more than in off-target sites.

[0215] Embodiment 162 is the method or composition for use of any one of embodiments 156-161, wherein the deletion or insertion of a nucleotide(s) occurs at less than or equal to 3, 2, 1, or 0 off-target site(s) in primary human hepatocytes, optionally wherein the off-target site(s) does (do) not occur in a protein coding region in the genome of the primary human hepatocytes.

[0216] Embodiment 163 is the method or composition for use of embodiment 162, wherein the deletion or insertion of a nucleotide(s) occurs at a number of off-target sites in primary human hepatocytes that is less than the number of off-target sites at which a deletion or insertion of a nucleotide(s) occurs in Cas9-overexpressing cells, optionally wherein the off-target site(s) does (do) not occur in a protein coding region in the genome of the primary human hepatocytes.

[0217] Embodiment 164 is the method or composition for use of embodiment 163, wherein the Cas9-overexpressing cells are HEK293 cells stably expressing Cas9.

[0218] Embodiment 165 is the method or composition for use of any one of embodiments 162-164, wherein the number of off-target sites in primary human hepatocytes is determined by analyzing genomic DNA from primary human hepatocytes transfected in vitro with Cas9 mRNA and the guide RNA, optionally wherein the off-target site(s) does (do) not occur in a protein coding region in the genome of the primary human hepatocytes.

[0219] Embodiment 166 is the method or composition for use of any one of embodiments 162-164, wherein the number of off-target sites in primary human hepatocytes is determined by an oligonucleotide insertion assay comprising analyzing genomic DNA from primary human hepatocytes transfected in vitro with Cas9 mRNA, the guide RNA, and a donor oligonucleotide, optionally wherein the off-target site(s) does (do) not occur in a protein coding region in the genome of the primary human hepatocytes.

[0220] Embodiment 167 is the method or composition of any one of the preceding embodiments, wherein the sequence of the guide RNA is:
[0221] a) SEQ ID NO: 92 or 104;
[0222] b) SEQ ID NO: 87, 89, 96, or 113;
[0223] c) SEQ ID NO: 100, 102, 106, 111, or 112; or
[0224] d) SEQ ID NO: 88, 90, 91, 93, 94, 95, 97, 101, 103, 108, or 109,

[0225] optionally wherein the guide RNA does not produce indels at off-target site(s) that occur in a protein coding region in the genome of primary human hepatocytes.

[0226] Embodiment 168 is the method or composition for use of any one of the preceding embodiments, wherein administering the composition reduces levels of TTR in the subject.

[0227] Embodiment 169 is the method or composition for use of embodiment 168, wherein the levels of TTR are reduced by at least 50%.

[0228] Embodiment 170 is the method or composition for use of embodiment 169, wherein the levels of TTR are reduced by 50%-60%, 60%-70%, 70% or 80%, 80%-90%, 90-95%, 95%-99%, or 99%-100%.

[0229] Embodiment 171 is the method or composition for use of embodiment 168 or 169, wherein the levels of TTR are measured in serum, plasma, blood, cerebral spinal fluid, or sputum.

[0230] Embodiment 172 is the method or composition for use of embodiment 168 or 169, wherein the levels of TTR are measured in liver, choroid plexus, and/or retina.

[0231] Embodiment 173 is the method or composition for use of any one of embodiments 168-172, wherein the levels of TTR are measured via enzyme-linked immunosorbent assay (ELISA).

[0232] Embodiment 174 is the method or composition for use of any one of the preceding embodiments, wherein the subject has ATTR.

[0233] Embodiment 175 is the method or composition for use of any one of the preceding embodiments, wherein the subject is human.

[0234] Embodiment 176 is the method or composition for use of embodiment 174 or 175, wherein the subject has ATTRwt.

[0235] Embodiment 177 is the method or composition for use of embodiment 174 or 175, wherein the subject has hereditary ATTR.

[0236] Embodiment 178 is the method or composition for use of any one of the preceding embodiments, wherein the subject has a family history of ATTR.

[0237] Embodiment 179 is the method or composition for use of any one of the preceding embodiments, wherein the subject has familial amyloid polyneuropathy.

[0238] Embodiment 180 is the method or composition for use of any one of the preceding embodiments, wherein the subject has only or predominantly nerve symptoms of ATTR.

[0239] Embodiment 181 is the method or composition for use of any one of embodiments 1-179, wherein the subject has familial amyloid cardiomyopathy.

[0240] Embodiment 182 is the method or composition for use of any one of embodiments 1-179 or 181, wherein the subject has only or predominantly cardiac symptoms of ATTR.

[0241] Embodiment 183 is the method or composition for use of any one of the preceding embodiments, wherein the subject expresses TTR having a V30 mutation.

[0242] Embodiment 184 is the method or composition for use of embodiment 183, wherein the V30 mutation is V30A, V30G, V30L, or V30M.

[0243] Embodiment 185 is the method or composition for use of embodiment any one of the preceding embodiments, wherein the subject expresses TTR having a T60 mutation.

[0244] Embodiment 186 is the method or composition for use of embodiment 185, wherein the T60 mutation is T60A.

[0245] Embodiment 187 is the method or composition for use of embodiment any one of the preceding embodiments, wherein the subject expresses TTR having a V122 mutation.

[0246] Embodiment 188 is the method or composition for use of embodiment 187, wherein the V122 mutation is V122A, V122I, or V122(−).

[0247] Embodiment 189 is the method or composition for use of any one of the preceding embodiments, wherein the subject expresses wild-type TTR.

[0248] Embodiment 190 is the method or composition for use of any one of embodiments 1-182 or 189, wherein the subject does not express TTR having a V30, T60, or V122 mutation.

[0249] Embodiment 191 is the method or composition for use of any one of embodiments 1-182 or 189-190, wherein the subject does not express TTR having a pathological mutation.

[0250] Embodiment 192 is the method or composition for use of any one of embodiments 190-192, wherein the subject is homozygous for wild-type TTR.

[0251] Embodiment 193 is the method or composition for use of any one of the preceding embodiments, wherein after administration the subject has an improvement, stabilization, or slowing of change in symptoms of sensorimotor neuropathy.

[0252] Embodiment 194 is the method or composition for use of embodiment 193, wherein the improvement, stabilization, or slowing of change in sensory neuropathy is measured using electromyogram, nerve conduction tests, or patient-reported outcomes.

[0253] Embodiment 195 is the method or composition for use of any one of the preceding embodiments, wherein the subject has an improvement, stabilization, or slowing of change in symptoms of congestive heart failure.

[0254] Embodiment 196 is the method or composition for use of embodiment 195, wherein the improvement, stabilization, or slowing of change in congestive heart failure is measured using cardiac biomarker tests, lung function tests, chest x-rays, or electrocardiography.

[0255] Embodiment 197 is the method or composition for use of any one of the preceding embodiments, wherein the composition or pharmaceutical formulation is administered via a viral vector.

[0256] Embodiment 198 is the method or composition for use of any one of the preceding embodiments, wherein the composition or pharmaceutical formulation is administered via lipid nanoparticles.

[0257] Embodiment 199 is the method or composition for use of any one of the preceding embodiments, wherein the subject is tested for specific mutations in the TTR gene before administering the composition or formulation.

[0258] Embodiment 200 is the method or composition of any one of embodiments 1-199, wherein the sequence selected from SEQ ID NOs: 5-82 is SEQ ID NO: 5.

[0259] Embodiment 201 is the method or composition of any one of embodiments 1-199, wherein the sequence selected from SEQ ID NOs: 5-82 is SEQ ID NO: 6.

[0260] Embodiment 202 is the method or composition of any one of embodiments 1-199, wherein the sequence selected from SEQ ID NOs: 5-82 is SEQ ID NO: 7.

[0261] Embodiment 203 is the method or composition of any one of embodiments 1-199, wherein the sequence selected from SEQ ID NOs: 5-82 is SEQ ID NO: 8.

[0262] Embodiment 204 is the method or composition of any one of embodiments 1-199, wherein the sequence selected from SEQ ID NOs: 5-82 is SEQ ID NO: 9.

[0263] Embodiment 205 is the method or composition of any one of embodiments 1-199, wherein the sequence selected from SEQ ID NOs: 5-82 is SEQ ID NO: 10.

[0264] Embodiment 206 is the method or composition of any one of embodiments 1-199, wherein the sequence selected from SEQ ID NOs: 5-82 is SEQ ID NO: 11.

[0265] Embodiment 207 is the method or composition of any one of embodiments 1-199, wherein the sequence selected from SEQ ID NOs: 5-82 is SEQ ID NO: 12.

[0266] Embodiment 208 is the method or composition of any one of embodiments 1-199, wherein the sequence selected from SEQ ID NOs: 5-82 is SEQ ID NO: 13.

[0267] Embodiment 209 is the method or composition of any one of embodiments 1-199, wherein the sequence selected from SEQ ID NOs: 5-82 is SEQ ID NO: 14.

[0268] Embodiment 210 is the method or composition of any one of embodiments 1-199, wherein the sequence selected from SEQ ID NOs: 5-82 is SEQ ID NO: 15.

[0269] Embodiment 211 is the method or composition of any one of embodiments 1-199, wherein the sequence selected from SEQ ID NOs: 5-82 is SEQ ID NO: 16.

[0270] Embodiment 212 is the method or composition of any one of embodiments 1-199, wherein the sequence selected from SEQ ID NOs: 5-82 is SEQ ID NO: 17.

[0271] Embodiment 213 is the method or composition of any one of embodiments 1-199, wherein the sequence selected from SEQ ID NOs: 5-82 is SEQ ID NO: 18.

[0272] Embodiment 214 is the method or composition of any one of embodiments 1-199, wherein the sequence selected from SEQ ID NOs: 5-82 is SEQ ID NO: 19.

[0273] Embodiment 215 is the method or composition of any one of embodiments 1-199, wherein the sequence selected from SEQ ID NOs: 5-82 is SEQ ID NO: 20.

[0274] Embodiment 216 is the method or composition of any one of embodiments 1-199, wherein the sequence selected from SEQ ID NOs: 5-82 is SEQ ID NO: 21.

[0275] Embodiment 217 is the method or composition of any one of embodiments 1-199, wherein the sequence selected from SEQ ID NOs: 5-82 is SEQ ID NO: 22.

[0276] Embodiment 218 is the method or composition of any one of embodiments 1-199, wherein the sequence selected from SEQ ID NOs: 5-82 is SEQ ID NO: 23.

[0277] Embodiment 219 is the method or composition of any one of embodiments 1-199, wherein the sequence selected from SEQ ID NOs: 5-82 is SEQ ID NO: 24.

[0278] Embodiment 220 is the method or composition of any one of embodiments 1-199, wherein the sequence selected from SEQ ID NOs: 5-82 is SEQ ID NO: 25.

[0279] Embodiment 221 is the method or composition of any one of embodiments 1-199, wherein the sequence selected from SEQ ID NOs: 5-82 is SEQ ID NO: 26.

[0280] Embodiment 222 is the method or composition of any one of embodiments 1-199, wherein the sequence selected from SEQ ID NOs: 5-82 is SEQ ID NO: 27.

[0281] Embodiment 223 is the method or composition of any one of embodiments 1-199, wherein the sequence selected from SEQ ID NOs: 5-82 is SEQ ID NO: 28.

[0282] Embodiment 224 is the method or composition of any one of embodiments 1-199, wherein the sequence selected from SEQ ID NOs: 5-82 is SEQ ID NO: 29.

[0283] Embodiment 225 is the method or composition of any one of embodiments 1-199, wherein the sequence selected from SEQ ID NOs: 5-82 is SEQ ID NO: 30.

[0284] Embodiment 226 is the method or composition of any one of embodiments 1-199, wherein the sequence selected from SEQ ID NOs: 5-82 is SEQ ID NO: 31.

[0285] Embodiment 227 is the method or composition of any one of embodiments 1-199, wherein the sequence selected from SEQ ID NOs: 5-82 is SEQ ID NO: 32.

[0286] Embodiment 228 is the method or composition of any one of embodiments 1-199, wherein the sequence selected from SEQ ID NOs: 5-82 is SEQ ID NO: 33.

[0287] Embodiment 229 is the method or composition of any one of embodiments 1-199, wherein the sequence selected from SEQ ID NOs: 5-82 is SEQ ID NO: 34.

[0288] Embodiment 230 is the method or composition of any one of embodiments 1-199, wherein the sequence selected from SEQ ID NOs: 5-82 is SEQ ID NO: 35.

[0289] Embodiment 231 is the method or composition of any one of embodiments 1-199, wherein the sequence selected from SEQ ID NOs: 5-82 is SEQ ID NO: 36.

[0290] Embodiment 232 is the method or composition of any one of embodiments 1-199, wherein the sequence selected from SEQ ID NOs: 5-82 is SEQ ID NO: 37.

[0291] Embodiment 233 is the method or composition of any one of embodiments 1-199, wherein the sequence selected from SEQ ID NOs: 5-82 is SEQ ID NO: 38.

[0292] Embodiment 234 is the method or composition of any one of embodiments 1-199, wherein the sequence selected from SEQ ID NOs: 5-82 is SEQ ID NO: 39.

[0293] Embodiment 235 is the method or composition of any one of embodiments 1-199, wherein the sequence selected from SEQ ID NOs: 5-82 is SEQ ID NO: 40.

[0294] Embodiment 236 is the method or composition of any one of embodiments 1-199, wherein the sequence selected from SEQ ID NOs: 5-82 is SEQ ID NO: 41.

[0295] Embodiment 237 is the method or composition of any one of embodiments 1-199, wherein the sequence selected from SEQ ID NOs: 5-82 is SEQ ID NO: 42.

[0296] Embodiment 238 is the method or composition of any one of embodiments 1-199, wherein the sequence selected from SEQ ID NOs: 5-82 is SEQ ID NO: 43.

[0297] Embodiment 239 is the method or composition of any one of embodiments 1-199, wherein the sequence selected from SEQ ID NOs: 5-82 is SEQ ID NO: 44.

[0298] Embodiment 240 is the method or composition of any one of embodiments 1-199, wherein the sequence selected from SEQ ID NOs: 5-82 is SEQ ID NO: 45.

[0299] Embodiment 241 is the method or composition of any one of embodiments 1-199, wherein the sequence selected from SEQ ID NOs: 5-82 is SEQ ID NO: 46.

[0300] Embodiment 242 is the method or composition of any one of embodiments 1-199, wherein the sequence selected from SEQ ID NOs: 5-82 is SEQ ID NO: 47.

[0301] Embodiment 243 is the method or composition of any one of embodiments 1-199, wherein the sequence selected from SEQ ID NOs: 5-82 is SEQ ID NO: 48.

[0302] Embodiment 244 is the method or composition of any one of embodiments 1-199, wherein the sequence selected from SEQ ID NOs: 5-82 is SEQ ID NO: 49.

[0303] Embodiment 245 is the method or composition of any one of embodiments 1-199, wherein the sequence selected from SEQ ID NOs: 5-82 is SEQ ID NO: 50.

[0304] Embodiment 246 is the method or composition of any one of embodiments 1-199, wherein the sequence selected from SEQ ID NOs: 5-82 is SEQ ID NO: 51.

[0305] Embodiment 247 is the method or composition of any one of embodiments 1-199, wherein the sequence selected from SEQ ID NOs: 5-82 is SEQ ID NO: 52.

[0306] Embodiment 248 is the method or composition of any one of embodiments 1-199, wherein the sequence selected from SEQ ID NOs: 5-82 is SEQ ID NO: 53.

[0307] Embodiment 249 is the method or composition of any one of embodiments 1-199, wherein the sequence selected from SEQ ID NOs: 5-82 is SEQ ID NO: 54.

[0308] Embodiment 250 is the method or composition of any one of embodiments 1-199, wherein the sequence selected from SEQ ID NOs: 5-82 is SEQ ID NO: 55.

[0309] Embodiment 251 is the method or composition of any one of embodiments 1-199, wherein the sequence selected from SEQ ID NOs: 5-82 is SEQ ID NO: 56.

[0310] Embodiment 252 is the method or composition of any one of embodiments 1-199, wherein the sequence selected from SEQ ID NOs: 5-82 is SEQ ID NO: 57.

[0311] Embodiment 253 is the method or composition of any one of embodiments 1-199, wherein the sequence selected from SEQ ID NOs: 5-82 is SEQ ID NO: 58.

[0312] Embodiment 254 is the method or composition of any one of embodiments 1-199, wherein the sequence selected from SEQ ID NOs: 5-82 is SEQ ID NO: 59.

[0313] Embodiment 255 is the method or composition of any one of embodiments 1-199, wherein the sequence selected from SEQ ID NOs: 5-82 is SEQ ID NO: 60.

[0314] Embodiment 256 is the method or composition of any one of embodiments 1-199, wherein the sequence selected from SEQ ID NOs: 5-82 is SEQ ID NO: 61.

[0315] Embodiment 257 is the method or composition of any one of embodiments 1-199, wherein the sequence selected from SEQ ID NOs: 5-82 is SEQ ID NO: 62.

[0316] Embodiment 258 is the method or composition of any one of embodiments 1-199, wherein the sequence selected from SEQ ID NOs: 5-82 is SEQ ID NO: 63.

[0317] Embodiment 259 is the method or composition of any one of embodiments 1-199, wherein the sequence selected from SEQ ID NOs: 5-82 is SEQ ID NO: 64.

[0318] Embodiment 260 is the method or composition of any one of embodiments 1-199, wherein the sequence selected from SEQ ID NOs: 5-82 is SEQ ID NO: 65.

[0319] Embodiment 261 is the method or composition of any one of embodiments 1-199, wherein the sequence selected from SEQ ID NOs: 5-82 is SEQ ID NO: 66.

[0320] Embodiment 262 is the method or composition of any one of embodiments 1-199, wherein the sequence selected from SEQ ID NOs: 5-82 is SEQ ID NO: 67.

[0321] Embodiment 263 is the method or composition of any one of embodiments 1-199, wherein the sequence selected from SEQ ID NOs: 5-82 is SEQ ID NO: 68.

[0322] Embodiment 264 is the method or composition of any one of embodiments 1-199, wherein the sequence selected from SEQ ID NOs: 5-82 is SEQ ID NO: 69.

[0323] Embodiment 265 is the method or composition of any one of embodiments 1-199, wherein the sequence selected from SEQ ID NOs: 5-82 is SEQ ID NO: 70.

[0324] Embodiment 266 is the method or composition of any one of embodiments 1-199, wherein the sequence selected from SEQ ID NOs: 5-82 is SEQ ID NO: 71.

[0325] Embodiment 267 is the method or composition of any one of embodiments 1-199, wherein the sequence selected from SEQ ID NOs: 5-82 is SEQ ID NO: 72.

[0326] Embodiment 268 is the method or composition of any one of embodiments 1-199, wherein the sequence selected from SEQ ID NOs: 5-82 is SEQ ID NO: 73.

[0327] Embodiment 269 is the method or composition of any one of embodiments 1-199, wherein the sequence selected from SEQ ID NOs: 5-82 is SEQ ID NO: 74.

[0328] Embodiment 270 is the method or composition of any one of embodiments 1-199, wherein the sequence selected from SEQ ID NOs: 5-82 is SEQ ID NO: 75.

[0329] Embodiment 271 is the method or composition of any one of embodiments 1-199, wherein the sequence selected from SEQ ID NOs: 5-82 is SEQ ID NO: 76.

[0330] Embodiment 272 is the method or composition of any one of embodiments 1-199, wherein the sequence selected from SEQ ID NOs: 5-82 is SEQ ID NO: 77.

[0331] Embodiment 273 is the method or composition of any one of embodiments 1-199, wherein the sequence selected from SEQ ID NOs: 5-82 is SEQ ID NO: 78.

[0332] Embodiment 274 is the method or composition of any one of embodiments 1-199, wherein the sequence selected from SEQ ID NOs: 5-82 is SEQ ID NO: 79.

[0333] Embodiment 275 is the method or composition of any one of embodiments 1-199, wherein the sequence selected from SEQ ID NOs: 5-82 is SEQ ID NO: 80.

[0334] Embodiment 276 is the method or composition of any one of embodiments 1-199, wherein the sequence selected from SEQ ID NOs: 5-82 is SEQ ID NO: 81.

[0335] Embodiment 277 is the method or composition of any one of embodiments 1-199, wherein the sequence selected from SEQ ID NOs: 5-82 is SEQ ID NO: 82.

[0336] Embodiment 278 is a use of a composition or formulation of any of the preceding embodiments for the preparation of a medicament for treating a human subject having ATTR.

### BRIEF DESCRIPTION OF THE DRAWINGS

[0337] FIG. 1 shows a schematic of chromosome 18 with the regions of the TTR gene that are targeted by the guide sequences provided in Table 1.

[0338] FIG. 2 shows off-target analysis in HEK293_Cas9 cells of certain dual guide RNAs targeting TTR. The on-target site is designated by a filled square for each dual guide RNA tested, whereas closed circles represent a potential off-target site.

[0339] FIG. 3 shows off-target analysis in HEK_Cas9 cells of certain single guide RNAs targeting TTR. The on-target site is designated by a filled square for each single guide RNA tested, whereas open circles represent a potential off-target site.

[0340] FIG. 4 shows dose response curves of lipid nanoparticle formulated human TTR specific sgRNAs on primary human hepatocytes.

[0341] FIG. 5 shows dose response curves of lipid nanoparticle formulated human TTR specific sgRNAs on primary cyno hepatocytes.

[0342] FIG. 6 shows dose response curves of lipid nanoparticle formulated cyno TTR specific sgRNAs on primary cyno hepatocytes.

[0343] FIG. 7 shows percent editing (% edit) of TTR and reduction of secreted TTR following administration of the guide in HUH7 cells sequences provided on the x-axis. The values are normalized to the amount of alpha-1-antitrypsin (AAT) protein.

[0344] FIG. 8 shows western blot analysis of intracellular TTR following administration of targeted guides (listed in Table 1) in HUH7 cells.

[0345] FIG. 9 shows percentage liver editing of TTR observed following administration of LNP formulations to mice with humanized (G481-G499) or murine (G282) TTR. Note: the first three ‘0’s in each Guide ID is omitted from the Figure, for example “G481” is “G000481” in Tables 2 and 3.

[0346] FIGS. 10A-B show serum TTR levels observed following the dosing regimens indicated on the horizontal axis as μg/ml (FIG. 10A) or percentage of TSS control (FIG. 10B). MPK=mg/kg throughout.

[0347] FIGS. 11A-B show serum TTR levels observed following the dosing regimens indicated on the horizontal axis for 1 mg/kg (FIG. 11A) or 0.5 mg/kg dosages (FIG. 11B). Data for a single 2 mg/kg dose is included as the right column in both panels.

[0348] FIGS. 12A-B show percentage liver editing observed following the dosing regimens indicated on the horizontal axis for 1 mg/kg (FIG. 12A) or 0.5 mg/kg dosages (FIG. 12B). FIG. 12C shows percentage liver editing observed following a single dose at 0.5, 1, or 2 mg/kg.

[0349] FIG. 13 shows percent liver editing observed following administration of LNP formulations to mice humanized with respect to the TTR gene. Note: the first three ‘0’s in each Guide ID is omitted from the Figure, for example “G481” is “G000481” in Tables 2 and 3.

[0350] FIGS. 14A-B show that there is correlation between liver editing (FIG. 14A) and serum human TTR levels (FIG. 14B) following administration of LNP formulations to mice humanized with respect to the TTR gene. Note: the first three ‘0’s in each Guide ID is omitted from the Figure, for example “G481” is “G000481” in Tables 2 and 3.

[0351] FIGS. 15A-B show that there is a dose response with respect to percent editing (FIG. 15A) and serum TTR levels (FIG. 15B) in wild type mice following administration of LNP formulations comprising guide G502, which is cross homologous between mouse and cyno.

[0352] FIG. 16 shows dose response curves of lipid nanoparticle formulated human TTR specific sgRNAs on primary cyno hepatocytes.

[0353] FIG. 17 shows dose response curves of lipid nanoparticle formulated cyno TTR specific sgRNAs on primary human hepatocytes.

[0354] FIG. 18 shows dose response curves of lipid nanoparticle formulated cyno TTR specific sgRNAs on primary cyno hepatocytes.

[0355] FIGS. 19A-D show serum TTR (% TSS; FIGS. 19A and 19C) and editing results following dosing of LNP formulations at the indicated ratios and amounts (FIGS. 19B and 19D).

[0356] FIG. 20 shows off-target analysis of certain single guide RNAs in Primary Human Hepatocytes (PHH) targeting TTR. In the graph, filled squares represent the identification of the on-target cut site, while open circles represent the identification of potential off-target sites.

[0357] FIGS. 21A-B show percent editing on-target (ONT, FIG. 21A) and at two off-target sites (OT2 and OT4) in primary human hepatocytes following administration of lipid nanoparticle formulated G000480. FIG. 21B is a re-scaled version of the OT2, OT4, and negative control (Neg Cont) data in FIG. 21A.

[0358] FIGS. 22A-B show percent editing on-target (ONT, FIG. 22A) and at an off-target site (OT4) in primary human hepatocytes following administration of lipid nanoparticle formulated G000486. FIG. 22B is a re-scaled version of the OT4 and negative control (Neg Cont) data in FIG. 22A.

[0359] FIGS. 23A-B show percent editing (FIG. 23A) and number of insertion and deletion events at the TTR locus (FIG. 23B). FIG. 23A shows percent editing at the TTR locus in control and treatment (dosed with lipid nanoparticle formulated TTR specific sgRNA) groups. FIG. 23B shows the number of insertion and deletion events at the TTR locus when editing was observed in the treatment group of FIG. 23A.

[0360] FIGS. 24A-B show TTR levels in circulating serum (FIG. 24A) and cerebrospinal fluid (CSF) (FIG. 24B), respectively, in μg/mL for control and treatment (dosed with lipid nanoparticle formulated TTR specific sgRNA) groups. Treatment resulted in >99% knockdown of TTR levels in serum.

[0361] FIGS. 25A-D show immunohistochemistry images with staining for TTR in stomach (FIG. 25A), colon (FIG. 25B), sciatic nerve (FIG. 25C), and dorsal root ganglion (DRG) (FIG. 25D) from control and treatment (dosed with lipid nanoparticle formulated TTR specific sgRNA) mice. At right, bar graphs show reduction in TTR staining 8 weeks after treatment in treated mice as measured by percent occupied area for each tissue type.

[0362] FIGS. 26A-C show liver TTR editing (FIG. 26A) and serum TTR results (in μg/mL (FIG. 26B) and as percentage of TSS-treated control (FIG. 26C)), respectively, from humanized TTR mice dosed with LNP formulations across a range of doses with guides G000480, G000488, G000489 and G000502 and containing Cas9 mRNA (SEQ ID NO: 1) in a 1:1 ratio by weight to the guide.

[0363] FIGS. 27A-C show liver TTR editing (FIG. 27A) and serum TTR results (in μg/mL (FIG. 27B) and as percentage of TSS-treated control (FIG. 27C)), respectively, from humanized TTR mice dosed with LNP formulations across a range of doses with guides G000481, G000482, G000486 and G000499 and containing Cas9 mRNA (SEQ ID NO: 1) in a 1:1 ratio by weight to the guide.

[0364] FIGS. 28A-C show liver TTR editing (FIG. 28A) and serum TTR results (in μg/mL (FIG. 28B) and as percentage of TSS-treated control (FIG. 28C)), respectively, from humanized TTR mice dosed with LNP formulations across a range of doses with guides G000480, G000481, G000486, G000499 and G000502 and containing Cas9 mRNA (SEQ ID NO: 1) in a 1:2 ratio by weight to the guide.

[0365] FIG. 29 shows relative expression of TTR mRNA in primary human hepatocytes (PHH) after treatment with LNPs comprising Cas9 mRNA and a gRNA as indicated, as compared to negative (untreated) controls.

[0366] FIG. 30 shows relative expression of TTR mRNA in primary human hepatocytes (PHH) after treatment with LNPs comprising Cas9 mRNA and a gRNA as indicated, as compared to negative (untreated) controls.

[0367] FIGS. 31A-C show serum TTR levels (FIG. 31A), liver TTR editing (FIG. 31B), and circulating ALT levels (FIG. 31C) in an in vivo study in nonhuman primates comparing 30′ administration of LNPs to a long dosing protocol.

### DETAILED DESCRIPTION

[0368] Reference will now be made in detail to certain embodiments of the invention, examples of which are illustrated in the accompanying drawings. While the invention will be described in conjunction with the illustrated embodiments, it will be understood that they are not intended to limit the invention to those embodiments. On the contrary, the invention is intended to cover all alternatives, modifications, and equivalents, which may be included within the invention as defined by the appended claims.

[0369] Before describing the present teachings in detail, it is to be understood that the disclosure is not limited to specific compositions or process steps, as such may vary. It should be noted that, as used in this specification and the appended claims, the singular form “a”, “an” and “the” include plural references unless the context clearly dictates otherwise. Thus, for example, reference to “a conjugate” includes a plurality of conjugates and reference to “a cell” includes a plurality of cells and the like.

[0370] Numeric ranges are inclusive of the numbers defining the range. Measured and measureable values are understood to be approximate, taking into account significant digits and the error associated with the measurement. Also, the use of “comprise”, “comprises”, “comprising”, “contain”, “contains”, “containing”, “include”, “includes”, and “including” are not intended to be limiting. It is to be understood that both the foregoing general description and detailed description are exemplary and explanatory only and are not restrictive of the teachings.

[0371] Unless specifically noted in the above specification, embodiments in the specification that recite “comprising” various components are also contemplated as “consisting of” or “consisting essentially of” the recited components; embodiments in the specification that recite “consisting of” various components are also contemplated as “comprising” or “consisting essentially of” the recited components; and embodiments in the specification that recite “consisting essentially of” various components are also contemplated as “consisting of” or “comprising” the recited components (this interchangeability does not apply to the use of these terms in the claims). The term “or” is used in an inclusive sense, i.e., equivalent to “and/or,” unless the context clearly indicates otherwise.

[0372] The section headings used herein are for organizational purposes only and are not to be construed as limiting the desired subject matter in any way. In the event that any material incorporated by reference contradicts any term defined in this specification or any other express content of this specification, this specification controls. While the present teachings are described in conjunction with various embodiments, it is not intended that the present teachings be limited to such embodiments. On the contrary, the present teachings encompass various alternatives, modifications, and equivalents, as will be appreciated by those of skill in the art.

### I. Definitions

[0373] Unless stated otherwise, the following terms and phrases as used herein are intended to have the following meanings:

[0374] “Polynucleotide” and “nucleic acid” are used herein to refer to a multimeric compound comprising nucleosides or nucleoside analogs which have nitrogenous heterocyclic bases or base analogs linked together along a backbone, including conventional RNA, DNA, mixed RNA-DNA, and polymers that are analogs thereof. A nucleic acid “backbone” can be made up of a variety of linkages, including one or more of sugar-phosphodiester linkages, peptide-nucleic acid bonds (“peptide nucleic acids” or PNA; PCT No. WO 95/32305), phosphorothioate linkages, methylphosphonate linkages, or combinations thereof. Sugar moieties of a nucleic acid can be ribose, deoxyribose, or similar compounds with substitutions, e.g., 2′ methoxy or 2′ halide substitutions. Nitrogenous bases can be conventional bases (A, G, C, T, U), analogs thereof (e.g., modified uridines such as 5-methoxyuridine, pseudouridine, or N1-methylpseudouridine, or others); inosine; derivatives of purines or pyrimidines (e.g., N⁴-methyl deoxyguanosine, deaza- or aza-purines, deaza- or aza-pyrimidines, pyrimidine bases with substituent groups at the 5 or 6 position (e.g., 5-methylcytosine), purine bases with a substituent at the 2, 6, or 8 positions, 2-amino-6-methylaminopurine, O⁶-methylguanine, 4-thio-pyrimidines, 4-amino-pyrimidines, 4-dimethylhydrazine-pyrimidines, and O⁴-alkyl-pyrimidines; U.S. Pat. No. 5,378,825 and PCT No. WO 93/13121). For general discussion see The Biochemistry of the Nucleic Acids 5-36, Adams et al., ed., 11^{th} ed., 1992). Nucleic acids can include one or more “abasic” residues where the backbone includes no nitrogenous base for position(s) of the polymer (U.S. Pat. No. 5,585,481). A nucleic acid can comprise only conventional RNA or DNA sugars, bases and linkages, or can include both conventional components and substitutions (e.g., conventional bases with 2′ methoxy linkages, or polymers containing both conventional bases and one or more base analogs). Nucleic acid includes “locked nucleic acid” (LNA), an analogue containing one or more LNA nucleotide monomers with a bicyclic furanose unit locked in an RNA mimicking sugar conformation, which enhance hybridization affinity toward complementary RNA and DNA sequences (Vester and Wengel, 2004, Biochemistry 43(42):13233-41). RNA and DNA have different sugar moieties and can differ by the presence of uracil or analogs thereof in RNA and thymine or analogs thereof in DNA.

[0375] “Polypeptide” as used herein refers to a multimeric compound comprising amino acid residues that can adopt a three-dimensional conformation. Polypeptides include but are not limited to enzymes, enzyme precursor proteins, regulatory proteins, structural proteins, receptors, nucleic acid binding proteins, antibodies, etc. Polypeptides may, but do not necessarily, comprise post-translational modifications, non-natural amino acids, prosthetic groups, and the like.

[0376] “Guide RNA”, “gRNA”, and “guide” are used herein interchangeably to refer to either a crRNA (also known as CRISPR RNA), or the combination of a crRNA and a trRNA (also known as tracrRNA). The crRNA and trRNA may be associated as a single RNA molecule (single guide RNA, sgRNA) or in two separate RNA molecules (dual guide RNA, dgRNA). “Guide RNA” or “gRNA” refers to each type. The trRNA may be a naturally-occurring sequence, or a trRNA sequence with modifications or variations compared to naturally-occurring sequences. Guide RNAs can include modified RNAs as described herein.

[0377] As used herein, a “guide sequence” refers to a sequence within a guide RNA that is complementary to a target sequence and functions to direct a guide RNA to a target sequence for binding or modification (e.g., cleavage) by an RNA-guided DNA binding agent. A “guide sequence” may also be referred to as a “targeting sequence,” or a “spacer sequence.” A guide sequence can be 20 base pairs in length, e.g., in the case of Streptococcus pyogenes (i.e., Spy Cas9) and related Cas9 homologs/orthologs. Shorter or longer sequences can also be used as guides, e.g., 15-, 16-, 17-, 18-, 19-, 21-, 22-, 23-, 24-, or 25-nucleotides in length. For example, in some embodiments, the guide sequence comprises at least 17, 18, 19, or 20 contiguous nucleotides of a sequence selected from SEQ ID NOs: 5-82. In some embodiments, the target sequence is in a gene or on a chromosome, for example, and is complementary to the guide sequence. In some embodiments, the degree of complementarity or identity between a guide sequence and its corresponding target sequence may be about 75%, 80%, 85%, 88%, 90%, 95%, 96%, 97%, 98%, 99%, or 100%. For example, in some embodiments, the guide sequence comprises a sequence with about 75%, 80%, 85%, 88%, 90%, 95%, 96%, 97%, 98%, 99%, or 100% identity to at least 17, 18, 19, or 20 contiguous nucleotides of a sequence selected from SEQ ID NOs: 5-82. In some embodiments, the guide sequence and the target region may be 100% complementary or identical. In other embodiments, the guide sequence and the target region may contain at least one mismatch. For example, the guide sequence and the target sequence may contain 1, 2, 3, or 4 mismatches, where the total length of the target sequence is at least 17, 18, 19, 20 or more base pairs. In some embodiments, the guide sequence and the target region may contain 1-4 mismatches where the guide sequence comprises at least 17, 18, 19, 20 or more nucleotides. In some embodiments, the guide sequence and the target region may contain 1, 2, 3, or 4 mismatches where the guide sequence comprises 20 nucleotides.

[0378] Target sequences for Cas proteins include both the positive and negative strands of genomic DNA (i.e., the sequence given and the sequence's reverse compliment), as a nucleic acid substrate for a Cas protein is a double stranded nucleic acid. Accordingly, where a guide sequence is said to be “complementary to a target sequence”, it is to be understood that the guide sequence may direct a guide RNA to bind to the reverse complement of a target sequence. Thus, in some embodiments, where the guide sequence binds the reverse complement of a target sequence, the guide sequence is identical to certain nucleotides of the target sequence (e.g., the target sequence not including the PAM) except for the substitution of U for T in the guide sequence.

[0379] As used herein, an “RNA-guided DNA binding agent” means a polypeptide or complex of polypeptides having RNA and DNA binding activity, or a DNA-binding subunit of such a complex, wherein the DNA binding activity is sequence-specific and depends on the sequence of the RNA. Exemplary RNA-guided DNA binding agents include Cas cleavases/nickases and inactivated forms thereof (“dCas DNA binding agents”). “Cas nuclease”, also called “Cas protein”, as used herein, encompasses Cas cleavases, Cas nickases, and dCas DNA binding agents. Cas cleavases/nickases and dCas DNA binding agents include a Csm or Cmr complex of a type III CRISPR system, the Cas10, Csm1, or Cmr2 subunit thereof, a Cascade complex of a type I CRISPR system, the Cas3 subunit thereof, and Class 2 Cas nucleases. As used herein, a “Class 2 Cas nuclease” is a single-chain polypeptide with RNA-guided DNA binding activity, such as a Cas9 nuclease or a Cpf1 nuclease. Class 2 Cas nucleases include Class 2 Cas cleavases and Class 2 Cas nickases (e.g., H840A, D10A, or N863A variants), which further have RNA-guided DNA cleavases or nickase activity, and Class 2 dCas DNA binding agents, in which cleavase/nickase activity is inactivated. Class 2 Cas nucleases include, for example, Cas9, Cpf1, C2c1, C2c2, C2c3, HF Cas9 (e.g., N497A, R661A, Q695A, Q926A variants), HypaCas9 (e.g., N692A, M694A, Q695A, H698A variants), eSPCas9(1.0) (e.g, K810A, K1003A, R1060A variants), and eSPCas9(1.1) (e.g., K848A, K1003A, R1060A variants) proteins and modifications thereof. Cpf1 protein, Zetsche et al., Cell, 163: 1-13 (2015), is homologous to Cas9, and contains a RuvC-like nuclease domain. Cpf1 sequences of Zetsche are incorporated by reference in their entirety. See, e.g., Zetsche, Tables S1 and S3. “Cas9” encompasses Spy Cas9, the variants of Cas9 listed herein, and equivalents thereof. See, e.g., Makarova et al., Nat Rev Microbiol, 13(11): 722-36 (2015); Shmakov et al., Molecular Cell, 60:385-397 (2015).

[0380] “Modified uridine” is used herein to refer to a nucleoside other than thymidine with the same hydrogen bond acceptors as uridine and one or more structural differences from uridine. In some embodiments, a modified uridine is a substituted uridine, i.e., a uridine in which one or more non-proton substituents (e.g., alkoxy, such as methoxy) takes the place of a proton. In some embodiments, a modified uridine is pseudouridine. In some embodiments, a modified uridine is a substituted pseudouridine, i.e., a pseudouridine in which one or more non-proton substituents (e.g., alkyl, such as methyl) takes the place of a proton, e.g., N1-methyl pseudouridine. In some embodiments, a modified uridine is any of a substituted uridine, pseudouridine, or a substituted pseudouridine.

[0381] “Uridine position” as used herein refers to a position in a polynucleotide occupied by a uridine or a modified uridine. Thus, for example, a polynucleotide in which “100% of the uridine positions are modified uridines” contains a modified uridine at every position that would be a uridine in a conventional RNA (where all bases are standard A, U, C, or G bases) of the same sequence. Unless otherwise indicated, a U in a polynucleotide sequence of a sequence table or sequence listing in, or accompanying, this disclosure can be a uridine or a modified uridine.

[0382] As used herein, a first sequence is considered to “comprise a sequence with at least X % identity to” a second sequence if an alignment of the first sequence to the second sequence shows that X % or more of the positions of the second sequence in its entirety are matched by the first sequence. For example, the sequence AAGA comprises a sequence with 100% identity to the sequence AAG because an alignment would give 100% identity in that there are matches to all three positions of the second sequence. The differences between RNA and DNA (generally the exchange of uridine for thymidine or vice versa) and the presence of nucleoside analogs such as modified uridines do not contribute to differences in identity or complementarity among polynucleotides as long as the relevant nucleotides (such as thymidine, uridine, or modified uridine) have the same complement (e.g., adenosine for all of thymidine, uridine, or modified uridine; another example is cytosine and 5-methylcytosine, both of which have guanosine or modified guanosine as a complement). Thus, for example, the sequence 5′-AXG where X is any modified uridine, such as pseudouridine, N1-methyl pseudouridine, or 5-methoxyuridine, is considered 100% identical to AUG in that both are perfectly complementary to the same sequence (5′-CAU). Exemplary alignment algorithms are the Smith-Waterman and Needleman-Wunsch algorithms, which are well-known in the art. One skilled in the art will understand what choice of algorithm and parameter settings are appropriate for a given pair of sequences to be aligned; for sequences of generally similar length and expected identity >50% for amino acids or >75% for nucleotides, the Needleman-Wunsch algorithm with default settings of the Needleman-Wunsch algorithm interface provided by the EBI at the www.ebi.ac.uk web server is generally appropriate.

[0383] “mRNA” is used herein to refer to a polynucleotide that is RNA or modified RNA and comprises an open reading frame that can be translated into a polypeptide (i.e., can serve as a substrate for translation by a ribosome and amino-acylated tRNAs). mRNA can comprise a phosphate-sugar backbone including ribose residues or analogs thereof, e.g., 2′-methoxy ribose residues. In some embodiments, the sugars of a nucleic acid phosphate-sugar backbone consist essentially of ribose residues, 2′-methoxy ribose residues, or a combination thereof. In general, mRNAs do not contain a substantial quantity of thymidine residues (e.g., 0 residues or fewer than 30, 20, 10, 5, 4, 3, or 2 thymidine residues; or less than 10%, 9%, 8%, 7%, 6%, 5%, 4%, 4%, 3%, 2%, 1%, 0.5%, 0.2%, or 0.1% thymidine content). An mRNA can contain modified uridines at some or all of its uridine positions.

[0384] As used herein, the “minimum uridine content” of a given ORF is the uridine content of an ORF that (a) uses a minimal uridine codon at every position and (b) encodes the same amino acid sequence as the given ORF. The minimal uridine codon(s) for a given amino acid is the codon(s) with the fewest uridines (usually 0 or 1 except for a codon for phenylalanine, where the minimal uridine codon has 2 uridines). Modified uridine residues are considered equivalent to uridines for the purpose of evaluating minimum uridine content.

[0385] As used herein, the “minimum uridine dinucleotide content” of a given ORF is the lowest possible uridine dinucleotide (UU) content of an ORF that (a) uses a minimal uridine codon (as discussed above) at every position and (b) encodes the same amino acid sequence as the given ORF. The uridine dinucleotide (UU) content can be expressed in absolute terms as the enumeration of UU dinucleotides in an ORF or on a rate basis as the percentage of positions occupied by the uridines of uridine dinucleotides (for example, AUUAU would have a uridine dinucleotide content of 40% because 2 of 5 positions are occupied by the uridines of a uridine dinucleotide). Modified uridine residues are considered equivalent to uridines for the purpose of evaluating minimum uridine dinucleotide content.

[0386] As used herein, the “minimum adenine content” of a given open reading frame (ORF) is the adenine content of an ORF that (a) uses a minimal adenine codon at every position and (b) encodes the same amino acid sequence as the given ORF. The minimal adenine codon(s) for a given amino acid is the codon(s) with the fewest adenines (usually 0 or 1 except for a codon for lysine and asparagine, where the minimal adenine codon has 2 adenines). Modified adenine residues are considered equivalent to adenines for the purpose of evaluating minimum adenine content.

[0387] As used herein, the “minimum adenine dinucleotide content” of a given open reading frame (ORF) is the lowest possible adenine dinucleotide (AA) content of an ORF that (a) uses a minimal adenine codon (as discussed above) at every position and (b) encodes the same amino acid sequence as the given ORF. The adenine dinucleotide (AA) content can be expressed in absolute terms as the enumeration of AA dinucleotides in an ORF or on a rate basis as the percentage of positions occupied by the adenines of adenine dinucleotides (for example, UAAUA would have an adenine dinucleotide content of 40% because 2 of 5 positions are occupied by the adenines of an adenine dinucleotide). Modified adenine residues are considered equivalent to adenines for the purpose of evaluating minimum adenine dinucleotide content.

[0388] As used herein, “TTR” refers to transthyretin, which is the gene product of a TTR gene.

[0389] As used herein, “amyloid” refers to abnormal aggregates of proteins or peptides that are normally soluble. Amyloids are insoluble, and amyloids can create proteinaceous deposits in organs and tissues. Proteins or peptides in amyloids may be misfolded into a form that allows many copies of the protein to stick together to form fibrils. While some forms of amyloid may have normal functions in the human body, “amyloids” as used herein refers to abnormal or pathologic aggregates of protein. Amyloids may comprise a single protein or peptide, such as TTR, or they may comprise multiple proteins or peptides, such as TTR and additional proteins.

[0390] As used herein, “amyloid fibrils” refers to insoluble fibers of amyloid that are resistant to degradation. Amyloid fibrils can produce symptoms based on the specific protein or peptide and the tissue and cell type in which it has aggregated.

[0391] As used herein, “amyloidosis” refers to a disease characterized by symptoms caused by deposition of amyloid or amyloid fibrils. Amyloidosis can affect numerous organs including the heart, kidney, liver, spleen, nervous system, and digestive track.

[0392] As used herein, “ATTR,” “TTR-related amyloidosis,” “TTR amyloidosis,” “ATTR amyloidosis,” or “amyloidosis associated with TTR” refers to amyloidosis associated with deposition of TTR.

[0393] As used herein, “familial amyloid cardiomyopathy” or “FAC” refers to a hereditary transthyretin amyloidosis (ATTR) characterized primarily by restrictive cardiomyopathy. Congestive heart failure is common in FAC. Average age of onset is approximately 60-70 years of age, with an estimated life expectancy of 4-5 years after diagnosis.

[0394] As used herein, “familial amyloid polyneuropathy” or “FAP” refers to a hereditary transthyretin amyloidosis (ATTR) characterized primarily by sensorimotor neuropathy. Autonomic neuropathy is common in FAP. While neuropathy is a primary feature, symptoms of FAP may also include cachexia, renal failure, and cardiac disease. Average age of onset of FAP is approximately 30-50 years of age, with an estimated life expectancy of 5-15 after diagnosis.

[0395] As used herein, “wild-type ATTR” and “ATTRwt” refer to ATTR not associated with a pathological TTR mutation such as T60A, V30M, V30A, V30G, V30L, V122I, V122A, or V122(−). ATTRwt has also been referred to as senile systemic amyloidosis. Onset typically occurs in men aged 60 or higher with the most common symptoms being congestive heart failure and abnormal heart rhythm such as atrial fibrillation. Additional symptoms include consequences of poor heart function such as shortness of breath, fatigue, dizziness, swelling (especially in the legs), nausea, angina, disrupted sleep, and weight loss. A history of carpal tunnel syndrome indicates increased risk for ATTRwt and may in some cases be indicative of early-stage disease. ATTRwt generally leads to decreasing heart function over time but can have a better prognosis than hereditary ATTR because wild-type TTR deposits accumulate more slowly. Existing treatments are similar to other forms of ATTR (other than liver transplantation) and are generally directed to supporting or improving heart function, ranging from diuretics and limited fluid and salt intake to anticoagulants, and in severe cases, heart transplants. Nonetheless, like FAC, ATTRwt can result in death from heart failure, sometimes within 3-5 years of diagnosis.

[0396] Guide sequences useful in the guide RNA compositions and methods described herein are shown in Table 1 and throughout the application.

[0397] As used herein, “hereditary ATTR” refers to ATTR that is associated with a mutation in the sequence of the TTR gene. Known mutations in the TTR gene associated with ATTR include those resulting in TTR with substitutions of T60A, V30M, V30A, V30G, V30L, V122I, V122A, or V122(−).

[0398] As used herein, “indels” refer to insertion/deletion mutations consisting of a number of nucleotides that are either inserted or deleted at the site of double-stranded breaks (DSBs) in a target nucleic acid.

[0399] As used herein, “knockdown” refers to a decrease in expression of a particular gene product (e.g., protein, mRNA, or both). Knockdown of a protein can be measured either by detecting protein secreted by tissue or population of cells (e.g., in serum or cell media) or by detecting total cellular amount of the protein from a tissue or cell population of interest. Methods for measuring knockdown of mRNA are known, and include sequencing of mRNA isolated from a tissue or cell population of interest. In some embodiments, “knockdown” may refer to some loss of expression of a particular gene product, for example a decrease in the amount of mRNA transcribed or a decrease in the amount of protein expressed or secreted by a population of cells (including in vivo populations such as those found in tissues).

[0400] As used herein, “knockout” refers to a loss of expression of a particular protein in a cell. Knockout can be measured either by detecting the amount of protein secretion from a tissue or population of cells (e.g., in serum or cell media) or by detecting total cellular amount of a protein a tissue or a population of cells. In some embodiments, methods are provided to “knockout” TTR in one or more cells (e.g., in a population of cells including in vivo populations such as those found in tissues). In some embodiments, a knockout is not the formation of mutant TTR protein, for example, created by indels, but rather the complete loss of expression of TTR protein in a cell.

[0401] As used herein, “mutant TTR” refers to a gene product of TTR (i.e., the TTR protein) having a change in the amino acid sequence of TTR compared to the wildtype amino acid sequence of TTR. The human wild-type TTR sequence is available at NCBI Gene ID: 7276; Ensembl: Ensembl: ENSG00000118271. Mutants forms of TTR associated with ATTR, e.g., in humans, include T60A, V30M, V30A, V30G, V30L, V122I, V122A, or V122(−).

[0402] As used herein, “mutant TTR” or “mutant TTR allele” refers to a TTR sequence having a change in the nucleotide sequence of TTR compared to the wildtype sequence (NCBI Gene ID: 7276; Ensembl: ENSG00000118271).

[0403] As used herein, “ribonucleoprotein” (RNP) or “RNP complex” refers to a guide RNA together with an RNA-guided DNA binding agent, such as a Cas nuclease, e.g., a Cas cleavase, Cas nickase, or dCas DNA binding agent (e.g., Cas9). In some embodiments, the guide RNA guides the RNA-guided DNA binding agent such as Cas9 to a target sequence, and the guide RNA hybridizes with and the agent binds to the target sequence; in cases where the agent is a cleavase or nickase, binding can be followed by cleaving or nicking.

[0404] As used herein, a “target sequence” refers to a sequence of nucleic acid in a target gene that has complementarity to the guide sequence of the gRNA. The interaction of the target sequence and the guide sequence directs an RNA-guided DNA binding agent to bind, and potentially nick or cleave (depending on the activity of the agent), within the target sequence.

[0405] As used herein, “treatment” refers to any administration or application of a therapeutic for disease or disorder in a subject, and includes inhibiting the disease, arresting its development, relieving one or more symptoms of the disease, curing the disease, or preventing reoccurrence of one or more symptoms of the disease. For example, treatment of ATTR may comprise alleviating symptoms of ATTR.

[0406] As used herein, the term “pathological mutation” refers to a mutation that renders a gene product, such as TTR, more likely to cause, promote, contribute to, or fail to inhibit the development of a disease, such as ATTR.

[0407] As used herein, the term “lipid nanoparticle” (LNP) refers to a particle that comprises a plurality of (i.e., more than one) lipid molecules physically associated with each other by intermolecular forces. The LNPs may be, e.g., microspheres (including unilamellar and multilamellar vesicles, e.g., “liposomes”—lamellar phase lipid bilayers that, in some embodiments, are substantially spherical—and, in more particular embodiments, can comprise an aqueous core, e.g., comprising a substantial portion of RNA molecules), a dispersed phase in an emulsion, micelles, or an internal phase in a suspension. Emulsions, micelles, and suspensions may be suitable compositions for local and/or topical delivery. See also, e.g., WO2017173054A1 and WO2019067992A1, the contents of which are hereby incorporated by reference in their entirety. Any LNP known to those of skill in the art to be capable of delivering nucleotides to subjects may be utilized with the guide RNAs and the nucleic acid encoding an RNA-guided DNA binding agent described herein.

[0408] As used herein, the terms “donor oligonucleotide” or “donor template” refers to a oligonucleotide that includes a desired nucleic acid sequence to be inserted into a target site (e.g., a target sit of a genomic DNA). A donor oligonucleotide may be a single-strand oligonucleotide or a double-strand oligonucleotide. In some embodiments, a donor oligonucleotide may be delivered with a guide RNA and a nucleic acid sequence encoding an RNA-guided DNA binding agent (e.g., Cas9) via use of LNP or transfection.

[0409] As used herein, the terms “nuclear localization signal” (NLS) or “nuclear localization sequence” refers to an amino acid sequence which induces transport of molecules comprising such sequences or linked to such sequences into the nucleus of eukaryotic cells. The nuclear localization signal may form part of the molecule to be transported. In some embodiments, the NLS may be linked to the remaining parts of the molecule by covalent bonds, hydrogen bonds or ionic interactions.

[0410] As used herein, the phrase “pharmaceutically acceptable” means that which is useful in preparing a pharmaceutical composition that is generally non-toxic and is not biologically undesirable and that are not otherwise unacceptable for pharmaceutical use.

[0411] The term “about” or “approximately” means an acceptable error for a particular value as determined by one of ordinary skill in the art, which depends in part on how the value is measured or determined.

[0412] As used herein, “infusion” refers to an active administration of one or more agents with an infusion time of, for example, between approximately 30 minutes and 12 hours. In some embodiments, the one or more agents comprise an LNP, e.g., comprising an mRNA encoding an RNA-guided DNA binding agent (such as Cas9) described herein and a gRNA described herein.

[0413] As used herein, “infusion prophylaxis” refers to a regimen administered to a subject before treatment (e.g., comprising administration of an LNP) comprising one or more, or all, of an intravenous corticosteroid (e.g., dexamethasone 10 mg or equivalent), an antipyretic (e.g. oral acetaminophen or paracetamol 500 mg), an intravenous H1 blocker (e.g., diphenhydramine 50 mg or equivalent), and an intravenous H2 blocker (e.g., ranitidine 50 mg or equivalent). Infusion prophylaxis is optionally combined with advance administration of an oral corticosteroid (e.g., dexamethasone 8 mg or equivalent). In some embodiments, the oral corticosteroid is administered 8-24 hours prior to treatment. In some embodiments, one or more, or all, of an intravenous corticosteroid (e.g., dexamethasone 10 mg or equivalent), oral acetaminophen 500 mg, an intravenous H1 blocker (e.g., diphenhydramine 50 mg or equivalent), an intravenous H2 blocker (e.g., ranitidine 50 mg or equivalent) are administered 1-2 hours before treatment. In some embodiments, an H1 blocker and/or an H2 blocker are administered orally.

### II. Methods and Compositions Targeting the TTR Gene

[0414] Disclosed herein are methods for treating amyloidosis associated with TTR (ATTR) in a subject, reducing TTR serum concentration in a subject, and/or reducing or preventing the accumulation of amyloids or amyloid fibrils in a subject, and related compositions, including compositions for use in such methods. A corticosteroid, guide RNA, RNA-guided DNA binding agent, or polynucleotide encoding an RNA-guided DNA binding agent, such as any of those described herein, is also provided for use in a method disclosed herein. For example, in some embodiments, the disclosed compositions such as LNP compositions comprise a guide RNA targeting TTR and, optionally, an RNA-guided DNA binding agent or a nucleic acid comprising an open reading frame encoding such an RNA-guided DNA binding agent (e.g., a CRISPR/Cas system). The subjects treated with such methods and compositions may have wild-type or non-wild type TTR gene sequences, such as, for example, subjects with ATTR, which may be ATTR wt or a hereditary or familial form of ATTR.

[0415] The dosage, frequency and mode of administration of the corticosteroid, infusion prophylaxis, and the guide-RNA containing composition described herein can be controlled independently.

[0416] In some embodiments, the corticosteroid is administered before the guide RNA-containing composition described herein. In some embodiments, the corticosteroid is administered after the guide RNA-containing composition described herein. In some embodiments, the corticosteroid is administered simultaneously with the guide RNA-containing composition described herein. In some embodiments, multiple doses of the corticosteroid are administered before or after the administration of the guide RNA-containing composition. In some embodiments, multiple doses of the guide RNA-containing composition are administered before or after the administration of the corticosteroid. In some embodiments, multiple doses of the corticosteroid and multiple doses of the guide RNA-containing composition are administered.

[0417] The guide RNA-containing composition, e.g. an LNP composition comprising a guide RNA and optionally a polynucleotide encoding an RNA-guided DNA binding agent, may be administered by infusion. In some embodiments, the composition is administered by infusion for longer than 30 minutes. In some embodiments, the composition is administered by 30 minute infusion. In some embodiments, the composition is administered by infusion for longer than 60 minutes. In some embodiments, the composition is administered by infusion for longer than 90 minutes. In some embodiments, the composition is administered by infusion for longer than 120 minutes, longer than 150 minutes, longer than 180 minutes, longer than 240 minutes, longer than 300 minutes, or longer than 360 minutes. In some embodiments, the composition is administered by infusion for at least 1 hour, at least 2 hours, at least 4 hours, at least 6 hours, at least 7 hours, at least 8 hours, at least 9 hours, at least 10 hours, at least 11 hours or at least 12 hours. In some embodiments, the composition is administered by infusion for 0.5-1.5 hours, 1.5-2.5 hours, 2.5-3.5 hours, 3.5-4.5 hours, 4.5-5.5 hours, 5.5-6.5 hours, 6.5-7.5 hours, 7.5-8.5 hours, 8.5-9.5 hours, 9.5-10.5 hours, 10.5-11.5 hours, or 11.5-12.5 hours. In some embodiments, the composition is administered by infusion for about 60 minutes, about 90 minutes, about 120 minutes, about 150 minutes, about 180 minutes, about 240 minutes, about 300 minutes, or about 360 minutes. In some embodiments, the composition is administered by infusion for about 45-75 minutes, 75-105 minutes, 105-135 minutes, 135-165 minutes, 165-195 minutes, 195-225 minutes, 225-255 minutes, 255-285 minutes, 285-315 minutes, 315-345 minutes, or 345-375 minutes. In some embodiments, the composition is administered by infusion for about 1.5-6 hours.

[0418] In some embodiments, the corticosteroid is administered about 5 minutes to within about 168 hours before the administration of the guide RNA-containing composition described herein. In some embodiments, the corticosteroid is administered about 5 minutes to within about 168 hours after the administration of the guide RNA-containing composition described herein. In some embodiments, the corticosteroid is administered 5 minutes, 10 minutes, 15 minutes, 30 minutes, 1 hour, 2 hours, 3 hours, 4 hours, 6 hours, 12 hours, 18 hours, 24 hours, 36 hours, 48 hours, 72 hours, 96 hours, 120 hours, 144 hours, 168 hours, or an amount of time in a range bounded by any two of the preceding values before the administration of the guide RNA-containing composition described herein. In some embodiments, the corticosteroid is administered 1 hour, 2 hours, 3 hours, 4 hours, 6 hours, 12 hours, 18 hours, 24 hours, 36 hours, 48 hours, 72 hours, 96 hours, 120 hours, 144 hours 168 hours, or an amount of time in a range bounded by any two of the preceding values after the administration of the guide RNA-containing composition described herein. In certain embodiments, a corticosteroid is delivered about 8-24 hours before administration of the guide RNA-containing composition and an infusion prophylaxis is administered 1-2 hours prior to administration of the guide RNA-containing composition. The corticosteroid may be administered with or at about the same time as the administration of the guide RNA-containing composition described herein.

[0419] If appropriate, a dose of corticosteroid may be administered as at least two sub-doses administered separately at appropriate intervals. In some embodiments, the corticosteroid is administered at least two times before the administration of the guide RNA-containing composition described herein. In some embodiments, a dose of corticosteroid is administered at least two times after the administration of the guide RNA-containing composition described herein. In some embodiments, the corticosteroid is administered (e.g., before, with, and/or after the administration of the guide RNA-containing composition described herein) at an interval of 1 hour, 2 hours, 3 hours, 4 hours, 6 hours, 12 hours, 18 hours; 1, 2, 3, 4, 5, 6, 7, 8, 9, 10, 11, 12, 13, 14, or 15 days; 3, 4, 5, 6, 7, 8, 9, 10, 11, 12, 13, 14, or 15 weeks; or an amount of time in a range bounded by any two of the preceding values. In some embodiments, the corticosteroid is administered before the administration of the guide RNA-containing composition described herein at an interval of 1 hour, 2 hours, 3 hours, 4 hours, 6 hours, 12 hours, 18 hours; 1, 2, 3, 4, 5, 6, 7, 8, 9, 10, 11, 12, 13, 14, 15 days; 3, 4, 5, 6, 7, 8, 9, 10, 11, 12, 13, 14, or 15 weeks; or an amount of time in a range bounded by any two of the preceding values. In some embodiments, the corticosteroid is administered after the administration of the guide RNA-containing composition described herein at an interval of 1 hour, 2 hours, 3 hours, 4 hours, 6 hours, 12 hours, 18 hours; 1, 2, 3, 4, 5, 6, 7, 8, 9, 10, 11, 12, 13, 14, 15 days; 3, 4, 5, 6, 7, 8, 9, 10, 11, 12, 13, 14, or 15 weeks; or an amount of time in a range bounded by any two of the preceding values.

[0420] In some embodiments, the corticosteroid is administered at least two times. In some embodiments, the corticosteroid is administered is administered at least three times. In some embodiments, the corticosteroid is administered at least four times. In some embodiments, the corticosteroid is administered is up to five, six, seven, eight, nine, or ten times. A first dose may be oral and a second or subsequent dose may be by parenteral administration, e.g. infusion. Alternatively, a first dose may be parenteral and a second or subsequent dose may be by oral administration.

[0421] In some embodiments, the corticosteroid is administered orally before intravenous administration of a guide RNA-containing composition described herein. In some embodiments, the corticosteroid is administered orally at or after intravenous administration of a guide RNA-containing composition described herein.

[0422] A. Corticosteroid; Infusion Prophylaxis

[0423] The corticosteroid used in the disclosed methods and compositions is useful for treating subjects undergoing gene editing and/or therapy with gene editing compositions. Without wishing to be bound to any particular theory, corticosteroids may be useful for reducing inflammation or immune responses to foreign RNAs (guide RNA or mRNAs encoding RNA-guided DNA binding agent). The corticosteroid used in the disclosed methods and compositions may be any of those known in the art and/or commercially available from a number of sources.

[0424] In some embodiments, an infusion prophylaxis is administered to a subject before the gene editing composition, e.g., at a time 1-2 hours prior to the administration of the gene editing composition. In some embodiments, the infusion prophylaxis comprises one or more, or all, of an intravenous corticosteroid (e.g., dexamethasone 8-12 mg, such as 10 mg or equivalent, or any of the other corticosteroids described elsewhere herein), an antipyretic (e.g. oral acetaminophen (also called paracetamol) 500 mg), an H1 blocker (e.g., diphenhydramine 50 mg or equivalent), an H2 blocker (e.g., ranitidine 50 mg or equivalent). In some embodiments, the infusion prophylaxis comprises an intravenous corticosteroid (e.g., dexamethasone 8-12 mg, such as 10 mg or equivalent) and an antipyretic (e.g. oral acetaminophen or paracetamol 500 mg). In some embodiments, the H1 blocker (e.g., diphenhydramine 50 mg or equivalent) and/or H2 blocker (e.g., ranitidine 50 mg or equivalent) are administered orally. In some embodiments, the H1 blocker (e.g., diphenhydramine 50 mg or equivalent) and/or H2 blocker (e.g., ranitidine 50 mg or equivalent) are administered intravenously. In some embodiments an intravenous H1 blocker and/or an intravenous H2 blocker is substituted with an equivalent, e.g., an orally administered equivalent. Additionally or alternatively, an oral corticosteroid (e.g., dexamethasone 6-10 mg, such as 8 mg or equivalent, or any of the other corticosteroids described elsewhere herein) may be administered, e.g., 8-24 hours prior to treatment. These dosages may be used, e.g., when the subject is a human, e.g., an adult human. In some embodiments, the infusion prophylaxis consists of the following: an intravenous corticosteroid (e.g., dexamethasone 10 mg or equivalent) which may reduce the severity of inflammation, oral acetaminophen 500 mg which may reduce pain and fever and/or inhibit COX enzymes and/or prostaglandins, intravenous H1 blocker (e.g., diphenhydramine 50 mg or equivalent), and intravenous H2 blocker (e.g., ranitidine 50 mg, or equivalent) which act to block the action of histamine at the H1 and H2 receptors respectively, and may optionally be preceded by administration of oral dexamethasone (such as in the amount of 8 mg or equivalent), e.g., at 8-24 hours prior to the administration of the gene editing composition. The infusion prophylaxis may function to reduce adverse reactions associated with administering a guide RNA-containing composition, e.g. an LNP composition. In some embodiments, the corticosteroid and/or infusion prophylaxis is administered as a required premedication prior to administering a guide RNA-containing composition, e.g. an LNP composition.

[0425] In some embodiments, the corticosteroid is concurrently administered with one or more of acetaminophen, H1 blocker, or H2 blocker. In some embodiments, the corticosteroid is concurrently administered with acetaminophen and H1 blocker. In some embodiments, the the corticosteroid is concurrently administered with acetaminophen and H2 blocker. In some embodiments, the corticosteroid is concurrently administered with H1 blocker and H2 blocker. In some embodiments, an H1 blocker and/or an H2 blocker are administered orally. In some embodiments, the composition is concurrently administered with acetaminophen, H1 blocker, and H2 blocker.

[0426] Many H1 and H2 blockers are known in the art. In some embodiments, the H1 blocker is diphenhydramine, clemastine, cetirizine, terfenadine, doxylamine, mirtazapine, dexbrompheniramine, triprolidine, cyproheptadine, loratadine, hydroxyzine, cinnarizine, astemizole, azatadine, meclizine, carbinoxamine, epinastine, olopatadine, tripelennamine, brompheniramine, ketotifen, fexofenadine, desloratadine, azelastine, dimenhydrinate, promethazine, mequitazine, emedastine, levocabastine, chlorpheniramine, cyclizine, alimemazine, phenindamine, pheniramine, methapyrilene, flunarizine, mianserin, levocetirizine, esmirtazapine, mepyramine, alcaftadine, antazoline, chloropyramine, dimetindene, dimetotiazine, acrivastine, dexchlorpheniramine maleate, ebastine, mizolastine, gsk-1004723, oxatomide, dexchlorpheniramine, bepotastine, buclizine, risperidone, methdilazine, maprotiline, diphenylpyraline, bromodiphenhydramine, ziprasidone, olanzapine, clozapine, promazine, trazodone, doxepin, desipramine, orphenadrine, methotrimeprazine, clofedanol, chlorprothixene, quetiapine, asenapine, benzatropine, aripiprazole, amitriptyline, imipramine, nortriptyline, trimipramine, isothipendyl, chlorpromazine, iloperidone, zuclopenthixol, chlorcyclizine, amoxapine, butriptyline, cariprazine, bilastine, dosulepin, rupatadine, pizotifen, thonzylamine, benzquinamide, propiomazine, aceprometazine, aripiprazole lauroxil, or deptropine.

[0427] In some embodiments, the H2 blocker is ranitidine, nizatidine, cimetidine, or famotidine. Equivalent corticosteroids and dosages can be found, for example, in Liu et al., Allergy, Asthma & Clinical Immunology, 2013, 9:30. Equivalent antihistamines (H1 blockers and/or H2 blockers) and dosages include the customary dose for a suitable member of the class, as known in the art.

[0428] In some embodiments, at least two doses of the corticosteroid are administered before the administration of the composition. In some embodiments, a first dose of the corticosteroid is administered before a second dose of the corticosteroid is administered before the composition is administered. In some embodiments, a first dose of the corticosteroid is administered within 8-24 hours before the composition is administered. In some embodiments, a first dose of the corticosteroid is administered orally within 8-24 hours before the composition is administered. In some embodiments, a second dose of the corticosteroid is administered within 1-2 hours before the composition is administered. In some embodiments, a second dose of the corticosteroid is administered intravenously within 1-2 hours before the composition is administered. In some embodiments, a first dose of the corticosteroid is administered within 8-24 hours before the composition is administered and a second dose of the corticosteroid is administered within 1-2 hours before the composition is administered.

[0429] In some embodiments, a first dose of the corticosteroid is administered orally and a second dose of the corticosteroid is administered intravenously before the composition is administered. In some embodiments, a first dose of the corticosteroid is administered orally within 8-24 hours before the composition is administered and a second dose of the corticosteroid is administered intravenously within 1-2 hours before the composition is administered.

[0430] In some embodiments, a first dose of the corticosteroid is administered orally and a second dose of the corticosteroid is concurrently administered with one or more of acetaminophen, H1 blocker, or H2 blocker before the composition is administered. In some embodiments, a first dose of the corticosteroid is administered orally and a second dose of the corticosteroid is concurrently administered with acetaminophen, H1 blocker and H2 blocker before the composition is administered. In some embodiments, a first dose of the corticosteroid is administered orally within 8-24 hours before the composition is administered and a second dose of the corticosteroid is administered intravenously concurrently administered with one or more of acetaminophen, H1 blocker or H2 blocker within 1-2 hours before the composition is administered. In some embodiments, a first dose of the corticosteroid is administered orally within 8-24 hours before the composition is administered and a second dose of the corticosteroid is administered intravenously concurrently administered with acetaminophen, H1 blocker and H2 blocker within 1-2 hours before the composition is administered. In some embodiments, a first dose of the corticosteroid is administered orally within 8-24 hours before the composition is administered and a second dose of the corticosteroid is administered intravenously concurrently administered with acetaminophen, H1 blocker and H2 blocker within 1-2 hours before the composition is administered, wherein the acetaminophen is administered orally and the H1 blocker and H2 blocker are administered intravenously.

[0431] In some embodiments, administering the corticosteroid improves tolerability of the composition comprising the guide RNA. For example, compared to administration of the composition comprising the guide RNA without the corticosteroid, administering the corticosteroid may reduce the incidence or severity of one or more adverse effects, such as inflammation, nausea, vomiting, elevated ALT concentration in blood, hyperthermia, and/or hyperalgesia. In some embodiments, administering the corticosteroid reduces or inhibits production or activity of one or more interferons and/or inflammatory cytokines in response to the composition comprising the guide RNA.

[0432] Exemplary corticosteroids include, but are not limited to, dexamethasone, betamethasone, prednisone, prednisolone, methylprednisolone, cortisone, hydrocortisone, triamcinolone, or ethamethasone, or a pharmaceutically acceptable salt thereof. Exemplary corticosteroids include, but are not limited to, dexamethasone, betamethasone, prednisone (Rayos®, Horizon Pharma), prednisolone (Pred Forte®, Allergan; Omnipred™, Novartis) methylprednisolone (Medrol®, Pharmacia&Upjohn; Solu-Medrolx®, Pharmacia&Upjohn), cortisone, hydrocortisone, triamcinolone, ethamethasone, budesonide (ENTOCORT®, Perrigo Pharma Intl.; Rhinocort®, Symbicort®, Astrazeneca Pharms; Ulceris®, Valeant Pharms), paramethasone, and deflazacort. In some embodiments, the corticosteroid is dexamethasone.

[0433] The corticosteroid used in the disclosed methods may be administered according to regimens known in the art, e.g., US FDA-approved regimens. Suitable modes of administration include, but are not limited to, enteral, topical, and parenteral administration. The phrases “parenteral administration” and “administered parenterally” as used herein means modes of administration other than enteral (which includes oral) and topical administration, usually by injection, and includes, without limitation, intravenous, intramuscular, intraarterial, intrathecal, intracapsular, intraorbital, intracardiac, intradermal, intraperitoneal, transtracheal, subcutaneous, subcuticular, intraarticular, subcapsular, subarachnoid, intraspinal and intrasternal injection and infusion. In some embodiments, the corticosteroid is administered to the subject parenterally or by injection. In some embodiments, the corticosteroid is administered to the subject by intravenous injection. In some embodiments, the corticosteroid is administered to the subject orally or enterally. In some embodiments, the corticosteroid is administered to the subject topically.

[0434] In some embodiments, e.g., comprising administration to or for use in a human subject, the corticosteroid can be administered in an amount that ranges from about 0.75 mg to about 25 mg. In some embodiments, e.g., comprising administration to or for use in a human subject, the corticosteroid can be administered in an amount that ranges from about 0.01-0.5 mg/kg, such as 0.1-0.40 mg/kg or 0.25-0.40 mg/kg.

[0435] In one example, dexamethasone is administered orally in the amount of 20 mg or 25 mg 6 to 12 hours before intravenous administration of the guide RNA. In another example, dexamethasone is administered intravenously in the amount of 20 mg or 25 mg for 30 minutes 6 to 12 hour before intravenous administration of the guide RNA. In another example, dexamethasone is administered orally in the amount of 8-12 mg, such as 10 mg, 8 to 24 hours before infusion of the guide RNA composition. In another example, dexamethasone is administered intravenously in the amount of 8-12 mg, such as 10 mg, 1-2 hour before infusion of the guide RNA composition. In another example, dexamethasone is administered orally in the amount of 8-12 mg, such as 10 mg, 8 to 24 hours before infusion of the guide RNA composition and dexamethasone is administered intravenously in the amount of 8-12 mg, such as 10 mg, 1-2 hour before infusion of the guide RNA composition.

[0436] In some embodiments, the corticosteroid is dexamethasone, and the dexamethasone is administered to the subject orally in the amount of 8 mg 8-24 hours before the composition is administered to the subject. In some embodiments, the corticosteroid is dexamethasone, and the dexamethasone is administered to the subject orally in the amount of 8 mg 8-24 hours before the composition is administered to the subject.

[0437] In some embodiments, the corticosteroid is dexamethasone, and the dexamethasone is administered to the subject intravenously in the amount of 10 mg 1-2 hours before the composition is administered to the subject. In some embodiments, the corticosteroid is dexamethasone, and the dexamethasone is administered to the subject intravenously in the amount of 10 mg 1-2 hours before the composition is administered to the subject.

[0438] In some embodiments, the corticosteroid is dexamethasone, and a first dose of dexamethasone in the amount of 8 mg is administered to the subject orally 8-24 hours before the composition is administered to the subject, and a second dose of dexamethasone in the amount of 10 mg is administered to the subject intravenously 1-2 hours before the composition is administered to the subject.

[0439] In some embodiments, the corticosteroid is dexamethasone, and a first dose of dexamethasone in the amount of 8 mg is administered to the subject orally 8-24 hours before the composition is administered to the subject, and a second dose of dexamethasone in the amount of 10 mg is administered to the subject intravenously 1-2 hours before the composition is administered to the subject, wherein the second dose of the corticosteroid is concurrently administered with one or more of acetaminophen, H1 blocker or H2 blocker.

[0440] In some embodiments, the corticosteroid is dexamethasone, and a first dose of dexamethasone in the amount of 8 mg is administered to the subject orally 8-24 hours before the composition is administered to the subject, and a second dose of dexamethasone in the amount of 10 mg is administered to the subject intravenously 1-2 hours before the composition is administered to the subject, wherein the second dose of the corticosteroid is concurrently administered with acetaminophen, H1 blocker and H2 blocker.

[0441] In some embodiments, the corticosteroid is dexamethasone, and a first dose of dexamethasone in the amount of 8 mg is administered to the subject orally 8-24 hours before the composition is administered to the subject, and a second dose of dexamethasone in the amount of 10 mg is administered to the subject intravenously, concurrently with oral administration of acetaminophen and intravenous administration of H1 blocker and H2 blocker, 1-2 hours before the composition is administered to the subject.

[0442] In some embodiments, the corticosteroid is dexamethasone, and a first dose of dexamethasone in the amount of 8 mg is administered to the subject orally 8-24 hours before the composition is administered to the subject, and a second dose of dexamethasone in the amount of 10 mg is administered to the subject intravenously, concurrently with oral administration of acetaminophen in the amount of 500 mg and intravenous administration of H1 blocker in the amount of 50 mg and H2 blocker in the amount of 50 mg, 1-2 hours before the composition is administered to the subject.

[0443] Further, it is recognized by those having ordinary skill in the art that the dose of corticosteroid is easily adjustable depending on the choice of particular corticosteroid. For example, for the purpose of comparison, the following are approximate equivalent mg dosages of corticosteroids: hydrocortisone 20 mg; cortisone 25 mg; prednisone or prednisolone 5 mg; deflazacort 6 mg; methylprednisolone 4 mg; dexamethasone or betamethasone 0.75 mg; triamcinolone 4 mg. Therefore, although the doses of corticosteroid presented in the above examples are based on dexamethasone, when another corticosteroid is to be administered to the patient, one of ordinary skill in the art would use the above conversion information to calculate equivalent doses of the other corticosteroid.

[0444] B. Guide RNA (gRNAs)

[0445] The guide RNA used in the disclosed methods and compositions comprises a guide sequence targeting the TTR gene. Exemplary guide sequences targeting the TTR gene are shown in Table 1 at SEQ ID Nos: 5-82.

TABLE 1
TTR targeted guide sequences, nomenclature, chromosomal coordinates, and
sequence.

| SEQ | | | | Chromosomal | |
|---|---|---|---|---|---|
| ID No. | Guide ID | Description | Species | Location | Guide Sequences* |
| 5 | CR003335 | TTR | Human | chr18:3159191 | CUGCUCCUCCUCUGCCUUGC |
| | | (Exon 1) | | 7-31591937 | |
| 6 | CR003336 | TTR | Human | chr18:3159192 | CCUCCUCUGCCUUGCUGGAC |
| | | (Exon 1) | | 2-31591942 | |
| 7 | CR003337 | TTR | Human | chr18:3159192 | CCAGUCCAGCAAGGCAGAGG |
| | | (Exon 1) | | 5-31591945 | |
| 8 | CR003338 | TTR | Human | chr18:3159192 | AUACCAGUCCAGCAAGGCAG |
| | | (Exon 1) | | 8-31591948 | |
| 9 | CR003339 | TTR | Human | chr18:3159193 | ACACAAAUACCAGUCCAGCA |
| | | (Exon 1) | | 4-31591954 | |
| 10 | CR003340 | TTR | Human | chr18:3159193 | UGGACUGGUAUUUGUGUCUG |
| | | (Exon 1) | | 7-31591957 | |
| 11 | CR003341 | TTR | Human | chr18:3159194 | CUGGUAUUUGUGUCUGAGGC |
| | | (Exon 1) | | 1-31591961 | |
| 12 | CR003342 | TTR | Human | chr18:3159288 | CUUCUCUACACCCAGGGCAC |
| | | (Exon 2) | | 0-31592900 | |
| 13 | CR003343 | TTR | Human | chr18:3159290 | CAGAGGACACUUGGAUUCAC |
| | | (Exon 2) | | 2-31592922 | |
| 14 | CR003344 | TTR | Human | chr18:3159291 | UUUGACCAUCAGAGGACACU |
| | | (Exon 2) | | 1-31592931 | |
| 15 | CR003345 | TTR | Human | chr18:3159291 | UCUAGAACUUUGACCAUCAG |
| | | (Exon 2) | | 9-31592939 | |
| 16 | CR003346 | TTR | Human | chr18:3159292 | AAAGUUCUAGAUGCUGUCCG |
| | | (Exon 2) | | 8-31592948 | |
| 17 | CR003347 | TTR | Human | chr18:3159294 | CAUUGAUGGCAGGACUGCCU |
| | | (Exon 2) | | 8-31592968 | |
| 18 | CR003348 | TTR | Human | chr18:3159294 | AGGCAGUCCUGCCAUCAAUG |
| | | (Exon 2) | | 8-31592968 | |
| 19 | CR003349 | TTR | Human | chr18:3159295 | UGCACGGCCACAUUGAUGGC |
| | | (Exon 2) | | 8-31592978 | |
| 20 | CR003350 | TTR | Human | chr18:3159296 | CACAUGCACGGCCACAUUGA |
| | | (Exon 2) | | 2-31592982 | |
| 21 | CR003351 | TTR | Human | chr18:3159297 | AGCCUUUCUGAACACAUGCA |
| | | (Exon 2) | | 4-31592994 | |
| 22 | CR003352 | TTR | Human | chr18:3159298 | GAAAGGCUGCUGAUGACACC |
| | | (Exon 2) | | 6-31593006 | |
| 23 | CR003353 | TTR | Human | chr18:3159298 | AAAGGCUGCUGAUGACACCU |
| | | (Exon 2) | | 7-31593007 | |
| 24 | CR003354 | TTR | Human | chr18:3159300 | ACCUGGGAGCCAUUUGCCUC |
| | | (Exon 2) | | 3-31593023 | |
| 25 | CR003355 | TTR | Human | chr18:3159300 | CCCAGAGGCAAAUGGCUCCC |
| | | (Exon 2) | | 7-31593027 | |
| 26 | CR003356 | TTR | Human | chr18:3159301 | GCAACUUACCCAGAGGCAAA |
| | | (Exon 2) | | 5-31593035 | |
| 27 | CR003357 | TTR | Human | chr18:3159302 | UUCUUUGGCAACUUACCCAG |
| | | (Exon 2) | | 2-31593042 | |
| 28 | CR003358 | TTR | Human | chr18:3159512 | AUGCAGCUCUCCAGACUCAC |
| | | (Exon 3) | | 7-31595147 | |
| 29 | CR003359 | TTR | Human | chr18:3159512 | AGUGAGUCUGGAGAGCUGCA |
| | | (Exon 3) | | 6-31595146 | |
| 30 | CR003360 | TTR | Human | chr18:3159512 | GUGAGUCUGGAGAGCUGCAU |
| | | (Exon 3) | | 7-31595147 | |
| 31 | CR003361 | TTR | Human | chr18:3159514 | GCUGCAUGGGCUCACAACUG |
| | | (Exon 3) | | 0-31595160 | |
| 32 | CR003362 | TTR | Human | chr18:3159514 | GCAUGGGCUCACAACUGAGG |
| | | (Exon 3) | | 3-31595163 | |
| 33 | CR003363 | TTR | Human | chr18:3159515 | ACUGAGGAGGAAUUUGUAGA |
| | | (Exon 3) | | 6-31595176 | |
| 34 | CR003364 | TTR | Human | chr18:3159515 | CUGAGGAGGAAUUUGUAGAA |
| | | (Exon 3) | | 7-31595177 | |
| 35 | CR003365 | TTR | Human | chr18:3159517 | UGUAGAAGGGAUAUACAAAG |
| | | (Exon 3) | | 0-31595190 | |
| 36 | CR003366 | TTR | Human | chr18:3159519 | AAAUAGACACCAAAUCUUAC |
| | | (Exon 3) | | 3-31595213 | |
| 37 | CR003367 | TTR | Human | chr18:3159519 | AGACACCAAAUCUUACUGGA |
| | | (Exon 3) | | 7-31595217 | |
| 38 | CR003368 | TTR | Human | chr18:3159520 | AAGUGCCUUCCAGUAAGAUU |
| | | (Exon 3) | | 5-31595225 | |
| 39 | CR003369 | TTR | Human | chr18:3159523 | CUCUGCAUGCUCAUGGAAUG |
| | | (Exon 3) | | 5-31595255 | |
| 40 | CR003370 | TTR | Human | chr18:3159523 | CCUCUGCAUGCUCAUGGAAU |
| | | (Exon 3) | | 6-31595256 | |
| 41 | CR003371 | TTR | Human | chr18:3159523 | ACCUCUGCAUGCUCAUGGAA |
| | | (Exon 3) | | 7-31595257 | |
| 42 | CR003372 | TTR | Human | chr18:3159524 | UACUCACCUCUGCAUGCUCA |
| | | (Exon 3) | | 2-31595262 | |
| 43 | CR003373 | TTR | Human | chr18:3159857 | GUAUUCACAGCCAACGACUC |
| | | (Exon 4) | | 0-31598590 | |
| 44 | CR003374 | TTR | Human | chr18:3159858 | GCGGCGGGGGCCGGAGUCGU |
| | | (Exon 4) | | 3-31598603 | |
| 45 | CR003375 | TTR | Human | chr18:3159859 | AAUGGUGUAGCGGCGGGGGC |
| | | (Exon 4) | | 2-31598612 | |
| 46 | CR003376 | TTR | Human | chr18:3159859 | CGGCAAUGGUGUAGCGGCGG |
| | | (Exon 4) | | 6-31598616 | |
| 47 | CR003377 | TTR | Human | chr18:3159859 | GCGGCAAUGGUGUAGCGGCG |
| | | (Exon 4) | | 7-31598617 | |
| 48 | CR003378 | TTR | Human | chr18:3159859 | GGCGGCAAUGGUGUAGCGGC |
| | | (Exon 4) | | 8-31598618 | |
| 49 | CR003379 | TTR | Human | chr18:3159859 | GGGCGGCAAUGGUGUAGCGG |
| | | (Exon 4) | | 9-31598619 | |
| 50 | CR003380 | TTR | Human | chr18:3159860 | GCAGGGCGGCAAUGGUGUAG |
| | | (Exon 4) | | 2-31598622 | |
| 51 | CR003381 | TTR | Human | chr18:3159861 | GGGGCUCAGCAGGGCGGCAA |
| | | (Exon 4) | | 0-31598630 | |
| 52 | CR003382 | TTR | Human | chr18:3159861 | GGAGUAGGGGCUCAGCAGGG |
| | | (Exon 4) | | 6-31598636 | |
| 53 | CR003383 | TTR | Human | chr18:3159861 | AUAGGAGUAGGGGCUCAGCA |
| | | (Exon 4) | | 9-31598639 | |
| 54 | CR003384 | TTR | Human | chr18:3159862 | AAUAGGAGUAGGGGCUCAGC |
| | | (Exon 4) | | 0-31598640 | |
| 55 | CR003385 | TTR | Human | chr18:3159862 | CCCCUACUCCUAUUCCACCA |
| | | (Exon 4) | | 6-31598646 | |
| 56 | CR003386 | TTR | Human | chr18:3159862 | CCGUGGUGGAAUAGGAGUAG |
| | | (Exon 4) | | 9-31598649 | |
| 57 | CR003387 | TTR | Human | chr18:3159863 | GCCGUGGUGGAAUAGGAGUA |
| | | (Exon 4) | | 0-31598650 | |
| 58 | CR003388 | TTR | Human | chr18:3159863 | GACGACAGCCGUGGUGGAAU |
| | | (Exon 4) | | 7-31598657 | |
| 59 | CR003389 | TTR | Human | chr18:3159864 | AUUGGUGACGACAGCCGUGG |
| | | (Exon 4) | | 3-31598663 | |
| 60 | CR003390 | TTR | Human | chr18:3159864 | GGGAUUGGUGACGACAGCCG |
| | | (Exon 4) | | 6-31598666 | |
| 61 | CR003391 | TTR | Human | chr18:3159864 | GGCUGUCGUCACCAAUCCCA |
| | | (Exon 4) | | 7-31598667 | |
| 62 | CR003392 | TTR | Human | chr18:3159866 | AGUCCCUCAUUCCUUGGGAU |
| | | (Exon 4) | | 1-31598681 | |
| 63 | CR005298 | TTR | Human | chr18:3159188 | UCCACUCAUUCUUGGCAGGA |
| | | (Exon 1) | | 3-31591903 | |
| 64 | CR005299 | TTR | Human | chr18:3159863 | AGCCGUGGUGGAAUAGGAGU |
| | | (Exon 4) | | 1-31598651 | |
| 65 | CR005300 | TTR | Human | chr18:3159196 | UCACAGAAACACUCACCGUA |
| | | (Exon 1) | | 7-31591987 | |
| 66 | CR005301 | TTR | Human | chr18:3159196 | GUCACAGAAACACUCACCGU |
| | | (Exon 1) | | 8-31591988 | |
| 67 | CR005302 | TTR | Human | chr18:3159287 | ACGUGUCUUCUCUACACCCA |
| | | (Exon 2) | | 4-31592894 | |
| 68 | CR005303 | TTR | Human | chr18:3159290 | UGAAUCCAAGUGUCCUCUGA |
| | | (Exon 2) | | 3-31592923 | |
| 69 | CR005304 | TTR | Human | chr18:3159296 | GGCCGUGCAUGUGUUCAGAA |
| | | (Exon 2) | | 9-31592989 | |
| 70 | CR005305 | TTR | Human | chr18:3159511 | UAUAGGAAAACCAGUGAGUC |
| | | (Exon 3) | | 4-31595134 | |
| 71 | CR005306 | TTR | Human | chr18:3159520 | AAAUCUUACUGGAAGGCACU |
| | | (Exon 3) | | 4-31595224 | |
| 72 | CR005307 | TTR | Human | chr18:3159854 | UGUCUGUCUUCUCUCAUAGG |
| | | (Exon 4) | | 8-31598568 | |
| 73 | CR000689 | TTR | Cyno | chr18:5068153 | ACACAAAUACCAGUCCAGCG |
| | | | | 3-50681553 | |
| 74 | CR005364 | TTR | Cyno | chr18:5068048 | AAAGGCUGCUGAUGAGACCU |
| | | | | 1-50680501 | |
| 75 | CR005365 | TTR | Cyno | chr18:5068052 | CAUUGACAGCAGGACUGCCU |
| | | | | 0-50680540 | |
| 76 | CR005366 | TTR | Cyno | chr18:5068153 | AUACCAGUCCAGCGAGGCAG |
| | | | | 9-50681559 | |
| 77 | CR005367 | TTR | Cyno | chr18:5068154 | CCAGUCCAGCGAGGCAGAGG |
| | | | | 2-50681562 | |
| 78 | CR005368 | TTR | Cyno | chr18:5068154 | CCUCCUCUGCCUCGCUGGAC |
| | | | | 5-50681565 | |
| 79 | CR005369 | TTR | Cyno | chr18:5068054 | AAAGUUCUAGAUGCCGUCCG |
| | | | | 0-50680560 | |
| 80 | CR005370 | TTR | Cyno | chr18:5068059 | ACUUGUCUUCUCUAUACCCA |
| | | | | 4-50680614 | |
| 81 | CR005371 | TTR | Cyno | chr18:5067821 | AAGUGACUUCCAGUAAGAUU |
| | | | | 6-50678236 | |
| 82 | CR005372 | TTR | Cyno | chr18:5068048 | AAAAGGCUGCUGAUGAGACC |
| | | | | 2-50680502 | |

[0446] Each of the Guide Sequences above may further comprise additional nucleotides to form a crRNA, e.g., with the following exemplary nucleotide sequence following the Guide Sequence at its 3′ end: GUUUUAGAGCUAUGCUGUUUUG (SEQ ID NO: 126). In the case of a sgRNA, the above Guide Sequences may further comprise additional nucleotides to form a sgRNA, e.g., with the following exemplary nucleotide sequence following the 3′ end of the Guide Sequence: GUUUUAGAGCUAGAAAUAGCAAGUUAAAAUAAGGCUAGUCCGUUAUCAACUU GAAAAAGUGGCACCGAGUCGGUGCUUUU (SEQ ID NO: 125) in 5′ to 3′ orientation.

[0447] In some embodiments, the sgRNA is modified. In some embodiments, the sgRNA comprises the modification pattern shown below in SEQ ID NO: 3, where N is any natural or non-natural nucleotide, and where the totality of the N's comprise a guide sequence as described herein and the modified sgRNA comprises the following sequence: mN*mN*mN*NNGUUUUAGAmGmCmUmAmGmAmAmAmU mAmGmCAAGUUAAAAUAAGGCUAGUCCGUUAUCAmAmCmUmUmGmAmAmAm AmAmGmUmGmGmCmAmCmCmGmAmGmUmCmGmGmUmGmCmU*mU*mU*mU (SEQ ID NO: 3), where “N” may be any natural or non-natural nucleotide. For example, encompassed herein is SEQ ID NO: 3, where the N's are replaced with any of the guide sequences disclosed herein. The modifications remain as shown in SEQ ID NO: 3 despite the substitution of N's for the nucleotides of a guide. That is, although the nucleotides of the guide replace the “N's”, the first three nucleotides are 2′OMe modified and there are phosphorothioate linkages between the first and second nucleotides, the second and third nucleotides and the third and fourth nucleotides.

[0448] In some embodiments, any one of the sequences recited in Table 2 is encompassed.

TABLE 2
TTR targeted sgRNA sequences

| SEQ | | | | |
|---|---|---|---|---|
| ID | | Target and | | |
| No. | Guide ID | Description | Species | Sequence |
| 87 | G000480 | TTR | Human | mA*mA*mA*GGCUGCUGAUGACACCUGU |
| | | sgRNA | | UUUAGAmGmCmUmAmGmAmAmAmUmA |
| | | modified | | mGmCAAGUUAAAAUAAGGCUAGUCCGU |
| | | sequence | | UAUCAmAmCmUmUmGmAmAmAmAmAm |
| | | | | GmUmGmGmCmAmCmCmGmAmGmUmCm |
| | | | | GmGmUmGmCmU*mU*mU*mU |
| 88 | G000481 | TTR | Human | mU*mC*mU*AGAACUUUGACCAUCAGGU |
| | | sgRNA | | UUUAGAmGmCmUmAmGmAmAmAmUmA |
| | | modified | | mGmCAAGUUAAAAUAAGGCUAGUCCGU |
| | | sequence | | UAUCAmAmCmUmUmGmAmAmAmAmAm |
| | | | | GmUmGmGmCmAmCmCmGmAmGmUmCm |
| | | | | GmGmUmGmCmU*mU*mU*mU |
| 89 | G000482 | TTR | Human | mU*mG*mU*AGAAGGGAUAUACAAAGG |
| | | sgRNA | | UUUUAGAmGmCmUmAmGmAmAmAmUm |
| | | modified | | AmGmCAAGUUAAAAUAAGGCUAGUCCG |
| | | sequence | | UUAUCAmAmCmUmUmGmAmAmAmAmA |
| | | | | mGmUmGmGmCmAmCmCmGmAmGmUmC |
| | | | | mGmGmUmGmCmU*mU*mU*mU |
| 90 | G000483 | TTR | Human | mU*mC*mC*ACUCAUUCUUGGCAGGAGU |
| | | sgRNA | | UUUAGAmGmCmUmAmGmAmAmAmUmA |
| | | modified | | mGmCAAGUUAAAAUAAGGCUAGUCCGU |
| | | sequence | | UAUCAmAmCmUmUmGmAmAmAmAmAm |
| | | | | GmUmGmGmCmAmCmCmGmAmGmUmCm |
| | | | | GmGmUmGmCmU*mU*mU*mU |
| 91 | G000484 | TTR | Human | mA*mG*mA*CACCAAAUCUUACUGGAGU |
| | | sgRNA | | UUUAGAmGmCmUmAmGmAmAmAmUmA |
| | | modified | | mGmCAAGUUAAAAUAAGGCUAGUCCGU |
| | | sequence | | UAUCAmAmCmUmUmGmAmAmAmAmAm |
| | | | | GmUmGmGmCmAmCmCmGmAmGmUmCm |
| | | | | GmGmUmGmCmU*mU*mU*mU |
| 92 | G000485 | TTR | Human | mC*mC*mU*CCUCUGCCUUGCUGGACGU |
| | | sgRNA | | UUUAGAmGmCmUmAmGmAmAmAmUmA |
| | | modified | | mGmCAAGUUAAAAUAAGGCUAGUCCGU |
| | | sequence | | UAUCAmAmCmUmUmGmAmAmAmAmAm |
| | | | | GmUmGmGmCmAmCmCmGmAmGmUmCm |
| | | | | GmGmUmGmCmU*mU*mU*mU |
| 93 | G000486 | TTR | Human | mA*mC*mA*CAAAUACCAGUCCAGCAGU |
| | | sgRNA | | UUUAGAmGmCmUmAmGmAmAmAmUmA |
| | | modified | | mGmCAAGUUAAAAUAAGGCUAGUCCGU |
| | | sequence | | UAUCAmAmCmUmUmGmAmAmAmAmAm |
| | | | | GmUmGmGmCmAmCmCmGmAmGmUmCm |
| | | | | GmGmUmGmCmU*mU*mU*mU |
| 94 | G000487 | TTR | Human | mU*mU*mC*UUUGGCAACUUACCCAGGU |
| | | sgRNA | | UUUAGAmGmCmUmAmGmAmAmAmUmA |
| | | modified | | mGmCAAGUUAAAAUAAGGCUAGUCCGU |
| | | sequence | | UAUCAmAmCmUmUmGmAmAmAmAmAm |
| | | | | GmUmGmGmCmAmCmCmGmAmGmUmCm |
| | | | | GmGmUmGmCmU*mU*mU*mU |
| 95 | G000488 | TTR | Human | mA*mA*mA*GUUCUAGAUGCUGUCCGGU |
| | | sgRNA | | UUUAGAmGmCmUmAmGmAmAmAmUmA |
| | | modified | | mGmCAAGUUAAAAUAAGGCUAGUCCGU |
| | | sequence | | UAUCAmAmCmUmUmGmAmAmAmAmAm |
| | | | | GmUmGmGmCmAmCmCmGmAmGmUmCm |
| | | | | GmGmUmGmCmU*mU*mU*mU |
| 96 | G000489 | TTR | Human | mU*mU*mU*GACCAUCAGAGGACACUGU |
| | | sgRNA | | UUUAGAmGmCmUmAmGmAmAmAmUmA |
| | | modified | | mGmCAAGUUAAAAUAAGGCUAGUCCGU |
| | | sequence | | UAUCAmAmCmUmUmGmAmAmAmAmAm |
| | | | | GmUmGmGmCmAmCmCmGmAmGmUmCm |
| | | | | GmGmUmGmCmU*mU*mU*mU |
| 97 | G000490 | TTR | Human | mA*mA*mA*UAGACACCAAAUCUUACGU |
| | | sgRNA | | UUUAGAmGmCmUmAmGmAmAmAmUmA |
| | | modified | | mGmCAAGUUAAAAUAAGGCUAGUCCGU |
| | | sequence | | UAUCAmAmCmUmUmGmAmAmAmAmAm |
| | | | | GmUmGmGmCmAmCmCmGmAmGmUmCm |
| | | | | GmGmUmGmCmU*mU*mU*mU |
| 98 | G000491 | TTR | Human | mA*mU*mA*CCAGUCCAGCAAGGCAGGU |
| | | sgRNA | | UUUAGAmGmCmUmAmGmAmAmAmUmA |
| | | modified | | mGmCAAGUUAAAAUAAGGCUAGUCCGU |
| | | sequence | | UAUCAmAmCmUmUmGmAmAmAmAmAm |
| | | | | GmUmGmGmCmAmCmCmGmAmGmUmCm |
| | | | | GmGmUmGmCmU*mU*mU*mU |
| 99 | G000492 | TTR | Human | mC*mU*mU*CUCUACACCCAGGGCACGU |
| | | sgRNA | | UUUAGAmGmCmUmAmGmAmAmAmUmA |
| | | modified | | mGmCAAGUUAAAAUAAGGCUAGUCCGU |
| | | sequence | | UAUCAmAmCmUmUmGmAmAmAmAmAm |
| | | | | GmUmGmGmCmAmCmCmGmAmGmUmCm |
| | | | | GmGmUmGmCmU*mU*mU*mU |
| 100 | G000493 | TTR | Human | mA*mA*mG*UGCCUUCCAGUAAGAUUGU |
| | | sgRNA | | UUUAGAmGmCmUmAmGmAmAmAmUmA |
| | | modified | | mGmCAAGUUAAAAUAAGGCUAGUCCGU |
| | | sequence | | UAUCAmAmCmUmUmGmAmAmAmAmAm |
| | | | | GmUmGmGmCmAmCmCmGmAmGmUmCm |
| | | | | GmGmUmGmCmU*mU*mU*mU |
| 101 | G000494 | TTR | Human | mG*mU*mG*AGUCUGGAGAGCUGCAUGU |
| | | sgRNA | | UUUAGAmGmCmUmAmGmAmAmAmUmA |
| | | modified | | mGmCAAGUUAAAAUAAGGCUAGUCCGU |
| | | sequence | | UAUCAmAmCmUmUmGmAmAmAmAmAm |
| | | | | GmUmGmGmCmAmCmCmGmAmGmUmCm |
| | | | | GmGmUmGmCmU*mU*mU*mU |
| 102 | G000495 | TTR | Human | mC*mA*mG*AGGACACUUGGAUUCACGU |
| | | sgRNA | | UUUAGAmGmCmUmAmGmAmAmAmUmA |
| | | modified | | mGmCAAGUUAAAAUAAGGCUAGUCCGU |
| | | sequence | | UAUCAmAmCmUmUmGmAmAmAmAmAm |
| | | | | GmUmGmGmCmAmCmCmGmAmGmUmCm |
| | | | | GmGmUmGmCmU*mU*mU*mU |
| 103 | G000496 | TTR | Human | mG*mG*mC*CGUGCAUGUGUUCAGAAGU |
| | | sgRNA | | UUUAGAmGmCmUmAmGmAmAmAmUmA |
| | | modified | | mGmCAAGUUAAAAUAAGGCUAGUCCGU |
| | | sequence | | UAUCAmAmCmUmUmGmAmAmAmAmAm |
| | | | | GmUmGmGmCmAmCmCmGmAmGmUmCm |
| | | | | GmGmUmGmCmU*mU*mU*mU |
| 104 | G000497 | TTR | Human | mC*mU*mG*CUCCUCCUCUGCCUUGCGU |
| | | sgRNA | | UUUAGAmGmCmUmAmGmAmAmAmUmA |
| | | modified | | mGmCAAGUUAAAAUAAGGCUAGUCCGU |
| | | sequence | | UAUCAmAmCmUmUmGmAmAmAmAmAm |
| | | | | GmUmGmGmCmAmCmCmGmAmGmUmCm |
| | | | | GmGmUmGmCmU*mU*mU*mU |
| 105 | G000498 | TTR | Human | mA*mG*mU*GAGUCUGGAGAGCUGCAGU |
| | | sgRNA | | UUUAGAmGmCmUmAmGmAmAmAmUmA |
| | | modified | | mGmCAAGUUAAAAUAAGGCUAGUCCGU |
| | | sequence | | UAUCAmAmCmUmUmGmAmAmAmAmAm |
| | | | | GmUmGmGmCmAmCmCmGmAmGmUmCm |
| | | | | GmGmUmGmCmU*mU*mU*mU |
| 106 | G000499 | TTR | Human | mU*mG*mA*AUCCAAGUGUCCUCUGAGU |
| | | sgRNA | | UUUAGAmGmCmUmAmGmAmAmAmUmA |
| | | modified | | mGmCAAGUUAAAAUAAGGCUAGUCCGU |
| | | sequence | | UAUCAmAmCmUmUmGmAmAmAmAmAm |
| | | | | GmUmGmGmCmAmCmCmGmAmGmUmCm |
| | | | | GmGmUmGmCmU*mU*mU*mU |
| 107 | G000500 | TTR | Human | mC*mC*mA*GUCCAGCAAGGCAGAGGGU |
| | | sgRNA | | UUUAGAmGmCmUmAmGmAmAmAmUmA |
| | | modified | | mGmCAAGUUAAAAUAAGGCUAGUCCGU |
| | | sequence | | UAUCAmAmCmUmUmGmAmAmAmAmAm |
| | | | | GmUmGmGmCmAmCmCmGmAmGmUmCm |
| | | | | GmGmUmGmCmU*mU*mU*mU |
| 108 | G000501 | TTR | Human | mU*mC*mA*CAGAAACACUCACCGUAGU |
| | | sgRNA | | UUUAGAmGmCmUmAmGmAmAmAmUmA |
| | | modified | | mGmCAAGUUAAAAUAAGGCUAGUCCGU |
| | | sequence | | UAUCAmAmCmUmUmGmAmAmAmAmAm |
| | | | | GmUmGmGmCmAmCmCmGmAmGmUmCm |
| | | | | GmGmUmGmCmU*mU*mU*mU |
| 109 | G000567 | TTR | Human | mG*mA*mA*AGGCUGCUGAUGACACCGU |
| | | sgRNA | | UUUAGAmGmCmUmAmGmAmAmAmUmA |
| | | modified | | mGmCAAGUUAAAAUAAGGCUAGUCCGU |
| | | sequence | | UAUCAmAmCmUmUmGmAmAmAmAmAm |
| | | | | GmUmGmGmCmAmCmCmGmAmGmUmCm |
| | | | | GmGmUmGmCmU*mU*mU*mU |
| 110 | G000568 | TTR | Human | mG*mG*mC*UGUCGUCACCAAUCCCAGU |
| | | sgRNA | | UUUAGAmGmCmUmAmGmAmAmAmUmA |
| | | modified | | mGmCAAGUUAAAAUAAGGCUAGUCCGU |
| | | sequence | | UAUCAmAmCmUmUmGmAmAmAmAmAm |
| | | | | GmUmGmGmCmAmCmCmGmAmGmUmCm |
| | | | | GmGmUmGmCmU*mU*mU*mU |
| 111 | G000570 | TTR | Human | mC*mA*mU*UGAUGGCAGGACUGCCUGU |
| | | sgRNA | | UUUAGAmGmCmUmAmGmAmAmAmUmA |
| | | modified | | mGmCAAGUUAAAAUAAGGCUAGUCCGU |
| | | sequence | | UAUCAmAmCmUmUmGmAmAmAmAmAm |
| | | | | GmUmGmGmCmAmCmCmGmAmGmUmCm |
| | | | | GmGmUmGmCmU*mU*mU*mU |
| 112 | G000571 | TTR | Human | mG*mU*mC*ACAGAAACACUCACCGUGU |
| | | sgRNA | | UUUAGAmGmCmUmAmGmAmAmAmUmA |
| | | modified | | mGmCAAGUUAAAAUAAGGCUAGUCCGU |
| | | sequence | | UAUCAmAmCmUmUmGmAmAmAmAmAm |
| | | | | GmUmGmGmCmAmCmCmGmAmGmUmCm |
| | | | | GmGmUmGmCmU*mU*mU*mU |
| 113 | G000572 | TTR | Human | mC*mC*mC*CUACUCCUAUUCCACCAGU |
| | | sgRNA | | UUUAGAmGmCmUmAmGmAmAmAmUmA |
| | | modified | | mGmCAAGUUAAAAUAAGGCUAGUCCGU |
| | | sequence | | UAUCAmAmCmUmUmGmAmAmAmAmAm |
| | | | | GmUmGmGmCmAmCmCmGmAmGmUmCm |
| | | | | GmGmUmGmCmU*mU*mU*mU |
| 114 | G000502 | TTR Cyno | Cyno | mA*mC*mA*CAAAUACCAGUCCAGCGGU |
| | | specific | | UUUAGAmGmCmUmAmGmAmAmAmUmA |
| | | sgRNA | | mGmCAAGUUAAAAUAAGGCUAGUCCGU |
| | | modified | | UAUCAmAmCmUmUmGmAmAmAmAmAm |
| | | sequence | | GmUmGmGmCmAmCmCmGmAmGmUmCm |
| | | | | GmGmUmGmCmU*mU*mU*mU |
| 115 | G000503 | TTR Cyno | Cyno | mA*mA*mA*AGGCUGCUGAUGAGACCGU |
| | | specific | | UUUAGAmGmCmUmAmGmAmAmAmUmA |
| | | sgRNA | | mGmCAAGUUAAAAUAAGGCUAGUCCGU |
| | | modified | | UAUCAmAmCmUmUmGmAmAmAmAmAm |
| | | sequence | | GmUmGmGmCmAmCmCmGmAmGmUmCm |
| | | | | GmGmUmGmCmU*mU*mU*mU |
| 116 | G000504 | TTR Cyno | Cyno | mA*mA*mA*GGCUGCUGAUGAGACCUGU |
| | | specific | | UUUAGAmGmCmUmAmGmAmAmAmUmA |
| | | sgRNA | | mGmCAAGUUAAAAUAAGGCUAGUCCGU |
| | | modified | | UAUCAmAmCmUmUmGmAmAmAmAmAm |
| | | sequence | | GmUmGmGmCmAmCmCmGmAmGmUmCm |
| | | | | GmGmUmGmCmU*mU*mU*mU |
| 117 | G000505 | TTR Cyno | Cyno | mC*mA*mU*UGACAGCAGGACUGCCUGU |
| | | specific | | UUUAGAmGmCmUmAmGmAmAmAmUmA |
| | | sgRNA | | mGmCAAGUUAAAAUAAGGCUAGUCCGU |
| | | modified | | UAUCAmAmCmUmUmGmAmAmAmAmAm |
| | | sequence | | GmUmGmGmCmAmCmCmGmAmGmUmCm |
| | | | | GmGmUmGmCmU*mU*mU*mU |
| 118 | G000506 | TTR Cyno | Cyno | mA*mU*mA*CCAGUCCAGCGAGGCAGGU |
| | | specific | | UUUAGAmGmCmUmAmGmAmAmAmUmA |
| | | sgRNA | | mGmCAAGUUAAAAUAAGGCUAGUCCGU |
| | | modified | | UAUCAmAmCmUmUmGmAmAmAmAmAm |
| | | sequence | | GmUmGmGmCmAmCmCmGmAmGmUmCm |
| | | | | GmGmUmGmCmU*mU*mU*mU |
| 119 | G000507 | TTR Cyno | Cyno | mC*mC*mA*GUCCAGCGAGGCAGAGGGU |
| | | specific | | UUUAGAmGmCmUmAmGmAmAmAmUmA |
| | | sgRNA | | mGmCAAGUUAAAAUAAGGCUAGUCCGU |
| | | modified | | UAUCAmAmCmUmUmGmAmAmAmAmAm |
| | | sequence | | GmUmGmGmCmAmCmCmGmAmGmUmCm |
| | | | | GmGmUmGmCmU*mU*mU*mU |
| 120 | G000508 | TTR Cyno | Cyno | mC*mC*mU*CCUCUGCCUCGCUGGACGU |
| | | specific | | UUUAGAmGmCmUmAmGmAmAmAmUmA |
| | | sgRNA | | mGmCAAGUUAAAAUAAGGCUAGUCCGU |
| | | modified | | UAUCAmAmCmUmUmGmAmAmAmAmAm |
| | | sequence | | GmUmGmGmCmAmCmCmGmAmGmUmCm |
| | | | | GmGmUmGmCmU*mU*mU*mU |
| 121 | G000509 | TTR Cyno | Cyno | mA*mA*mA*GUUCUAGAUGCCGUCCGGU |
| | | specific | | UUUAGAmGmCmUmAmGmAmAmAmUmA |
| | | sgRNA | | mGmCAAGUUAAAAUAAGGCUAGUCCGU |
| | | modified | | UAUCAmAmCmUmUmGmAmAmAmAmAm |
| | | sequence | | GmUmGmGmCmAmCmCmGmAmGmUmCm |
| | | | | GmGmUmGmCmU*mU*mU*mU |
| 122 | G000510 | TTR Cyno | Cyno | mA*mC*mU*UGUCUUCUCUAUACCCAGU |
| | | specific | | UUUAGAmGmCmUmAmGmAmAmAmUmA |
| | | sgRNA | | mGmCAAGUUAAAAUAAGGCUAGUCCGU |
| | | modified | | UAUCAmAmCmUmUmGmAmAmAmAmAm |
| | | sequence | | GmUmGmGmCmAmCmCmGmAmGmUmCm |
| | | | | GmGmUmGmCmU*mU*mU*mU |
| 123 | G000511 | TTR Cyno | Cyno | mA*mA*mG*UGACUUCCAGUAAGAUUGU |
| | | specific | | UUUAGAmGmCmUmAmGmAmAmAmUmA |
| | | sgRNA | | mGmCAAGUUAAAAUAAGGCUAGUCCGU |
| | | modified | | UAUCAmAmCmUmUmGmAmAmAmAmAm |
| | | sequence | | GmUmGmGmCmAmCmCmGmAmGmUmCm |
| | | | | GmGmUmGmCmU*mU*mU*mU |
| 124 | G000282 | TTR | Mouse | mU*mU*mA*CAGCCACGUCUACAGCAGU |
| | | | | UUUAGAmGmCmUmAmGmAmAmAmUmA |
| | | | | mGmCAAGUUAAAAUAAGGCUAGUCCGU |
| | | | | UAUCAmAmCmUmUmGmAmAmAmAmAm |
| | | | | GmUmGmGmCmAmCmCmGmAmGmUmCm |
| | | | | GmGmUmGmCmU*mU*mU*mU |

* = PS linkage;
‘m’ = 2′-O-Me nucleotide

[0449] An alignment mapping of the Guide IDs with the corresponding sgRNA IDs as well as homology to the cyno genome and cyno matched guide IDs are provided in Table 3.

TABLE 3
TTR targeted guide sequence ID mapping and Cyno Homology

| | Human | Human | Number | Cyno | Cyno |
|---|---|---|---|---|---|
| | Dual | Single | Mismatches | Matched | Matched |
| Descrip- | Guide | Guide | to Cyno | dgRNA | sgRNA |
| tion | ID | ID | Genome | ID | ID |
| TTR | CR003335 | G000497 | 1 | | |
| TTR | CR003336 | G000485 | 1 | CR005368 | G000508 |
| TTR | CR003337 | G000500 | 1 | CR005367 | G000507 |
| TTR | CR003338 | G000491 | 1 | CR005366 | G000506 |
| TTR | CR003339 | G000486 | 1 | CR000689 | G000502 |
| TTR | CR003340 | | 0 | | |
| TTR | CR003341 | | 0 | | |
| TTR | CR003342 | G000492 | no PAM | | |
| | | | in cyno | | |
| TTR | CR003343 | G000495 | no PAM | | |
| | | | in cyno | | |
| TTR | CR003344 | G000489 | 0 | | |
| TTR | CR003345 | G000481 | 0 | | |
| TTR | CR003346 | G000488 | 1 | CR005369 | G000509 |
| TTR | CR003347 | G000570 | 2 | CR005365 | G000505 |
| TTR | CR003348 | | 2 | | |
| TTR | CR003349 | | >3 | | |
| TTR | CR003350 | | no PAM | | |
| | | | in cyno | | |
| TTR | CR003351 | | no PAM | | |
| | | | in cyno | | |
| TTR | CR003352 | G000567 | 2 | CR005372 | G000503 |
| TTR | CR003353 | G000480 | 1 | CR005364 | G000504 |
| TTR | CR003354 | | 1 | | |
| TTR | CR003355 | | 1 | | |
| TTR | CR003356 | | 3 | | |
| TTR | CR003357 | G000487 | >3 | | |
| TTR | CR003358 | | 0 | | |
| TTR | CR003359 | G000498 | 0 | | |
| TTR | CR003360 | G000494 | 0 | | |
| TTR | CR003361 | | 0 | | |
| TTR | CR003362 | | 0 | | |
| TTR | CR003363 | | 0 | | |
| TTR | CR003364 | | 0 | | |
| TTR | CR003365 | G000482 | 0 | | |
| TTR | CR003366 | G000490 | 0 | | |
| TTR | CR003367 | G000484 | no PAM | | |
| | | | in cyno | | |
| TTR | CR003368 | G000493 | 1 | CR005371 | G000511 |
| TTR | CR003369 | | 0 | | |
| TTR | CR003370 | | 0 | | |
| TTR | CR003371 | | 0 | | |
| TTR | CR003372 | | 0 | | |
| TTR | CR003373 | | 1 | | |
| TTR | CR003374 | | 2 | | |
| TTR | CR003375 | | 2 | | |
| TTR | CR003376 | | 2 | | |
| TTR | CR003377 | | 2 | | |
| TTR | CR003378 | | 2 | | |
| TTR | CR003379 | | 2 | | |
| TTR | CR003380 | | 1 | | |
| TTR | CR003381 | | 1 | | |
| TTR | CR003382 | | 0 | | |
| TTR | CR003383 | | 0 | | |
| TTR | CR003384 | | 0 | | |
| TTR | CR003385 | G000572 | 0 | | |
| TTR | CR003386 | | 0 | | |
| TTR | CR003387 | | 0 | | |
| TTR | CR003388 | | 0 | | |
| TTR | CR003389 | G000569 | 0 | | |
| TTR | CR003390 | | 0 | | |
| TTR | CR003391 | G000568 | 0 | | |
| TTR | CR003392 | | 0 | | |
| TTR | CR005298 | G000483 | 1 | | |
| TTR | CR005299 | | 0 | | |
| TTR | CR005300 | G000501 | no PAM | | |
| | | | in cyno | | |
| TTR | CR005301 | G000571 | 0 | | |
| TTR | CR005302 | | 2 | CR005370 | G000510 |
| TTR | CR005303 | G000499 | 0 | | |
| TTR | CR005304 | G000496 | >3 | | |
| TTR | CR005305 | | 0 | | |
| TTR | CR005306 | | 1 | | |
| TTR | CR005307 | | 0 | | |

[0450] In some embodiments, the gRNA comprises a guide sequence that direct an RNA-guided DNA binding agent, which can be a nuclease (e.g., a Cas nuclease such as Cas9), to a target DNA sequence in TTR. The gRNA may comprise a crRNA comprising a guide sequence shown in Table 1. The gRNA may comprise a crRNA comprising 17, 18, 19, or 20 contiguous nucleotides of a guide sequence shown in Table 1. In some embodiments, the gRNA comprises a crRNA comprising a sequence with about 75%, 80%, 85%, 90%, 95%, 96%, 97%, 98%, 99%, or 100% identity to at least 17, 18, 19, or 20 contiguous nucleotides of a guide sequence shown in Table 1. In some embodiments, the gRNA comprises a crRNA comprising a sequence with about 75%, 80%, 85%, 90%, 95%, 96%, 97%, 98%, 99%, or 100% identity to a guide sequence shown in Table 1. The gRNA may further comprise a trRNA. In each composition and method embodiment described herein, the crRNA and trRNA may be associated as a single RNA (sgRNA), or may be on separate RNAs (dgRNA). In the context of sgRNAs, the crRNA and trRNA components may be covalently linked, e.g., via a phosphodiester bond or other covalent bond.

[0451] In each of the composition, use, and method embodiments described herein, the guide RNA may comprise two RNA molecules as a “dual guide RNA” or “dgRNA”. The dgRNA comprises a first RNA molecule comprising a crRNA comprising, e.g., a guide sequence shown in Table 1, and a second RNA molecule comprising a trRNA. The first and second RNA molecules may not be covalently linked, but may form a RNA duplex via the base pairing between portions of the crRNA and the trRNA.

[0452] In each of the composition, use, and method embodiments described herein, the guide RNA may comprise a single RNA molecule as a “single guide RNA” or “sgRNA”. The sgRNA may comprise a crRNA (or a portion thereof) comprising a guide sequence shown in Table 1 covalently linked to a trRNA. The sgRNA may comprise 17, 18, 19, or 20 contiguous nucleotides of a guide sequence shown in Table 1. In some embodiments, the crRNA and the trRNA are covalently linked via a linker. In some embodiments, the sgRNA forms a stem-loop structure via the base pairing between portions of the crRNA and the trRNA. In some embodiments, the crRNA and the trRNA are covalently linked via one or more bonds that are not a phosphodiester bond.

[0453] In some embodiments, the trRNA may comprise all or a portion of a trRNA sequence derived from a naturally-occurring CRISPR/Cas system. In some embodiments, the trRNA comprises a truncated or modified wild type trRNA. The length of the trRNA depends on the CRISPR/Cas system used. In some embodiments, the trRNA comprises or consists of 5, 6, 7, 8, 9, 10, 11, 12, 13, 14, 15, 16, 17, 18, 19, 20, 25, 30, 40, 50, 60, 70, 80, 90, 100, or more than 100 nucleotides. In some embodiments, the trRNA may comprise certain secondary structures, such as, for example, one or more hairpin or stem-loop structures, or one or more bulge structures.

[0454] In some embodiments, the composition comprises one or more guide RNAs comprising a guide sequence selected from SEQ ID NOs: 5-82.

[0455] In some embodiments, the composition comprises a gRNA that comprises a guide sequence that is at least 99%, 98%, 97%, 96%, 95%, 94%, 93%, 92%, 91%, or 90% identical to a sequence selected from SEQ ID NOs: 5-82.

[0456] In some embodiments, the composition comprises one or more guide RNAs comprising a guide sequence selected from SEQ ID NOs: 5-72, 74-78, and 80-82. In some embodiments, the composition comprises a gRNA that comprises a guide sequence that is at least 99%, 98%, 97%, 96%, 95%, 94%, 93%, 92%, 91%, or 90% identical to a sequence selected from SEQ ID NOs: 5-72, 74-78, and 80-82. In some embodiments, the sequence selected from SEQ ID NOs: 5-72, 74-78, and 80-82 is SEQ ID NOs: 5, 6, 7, 8, 9, 12, 13, 14, 15, 16, 17, 22, 23, 27, 29, 30, 35, 36, 37, 38, 55, 61, 63, 65, 66, 68, or 69. In some embodiments, the sequence selected from SEQ ID NOs: 5-72, 74-78, and 80-82 is SEQ ID NO: 5, 6, 9, 13, 14, 15, 16, 17, 22, 23, 27, 30, 35, 36, 37, 38, 55, 63, 65, 66, 68, or 69.

[0457] In other embodiments, the composition comprises at least one, e.g., at least two gRNAs comprising guide sequences selected from any two or more of the guide sequences of SEQ ID NOs: 5-82. In some embodiments, the composition comprises at least two gRNAs that each comprise a guide sequence at least 99%, 98%, 97%, 96%, 95%, 94%, 93%, 92%, 91%, or 90% identical to a sequence selected from SEQ ID NOs: 5-82.

[0458] In other embodiments, the composition comprises at least one, e.g., at least two gRNAs comprising guide sequences selected from any two or more of the guide sequences selected from SEQ ID NOs: 5-72, 74-78, and 80-82. In some embodiments, the composition comprises at least two gRNAs that each comprise a guide sequence at least 99%, 98%, 97%, 96%, 95%, 94%, 93%, 92%, 91%, or 90% identical to any of the sequences selected from SEQ ID NOs: 5-72, 74-78, and 80-82. In some embodiments, the sequences selected from SEQ ID NOs: 5-72, 74-78, and 80-82 comprise a sequence, or two sequences, selected from SEQ ID NOs: 5, 6, 7, 8, 9, 12, 13, 14, 15, 16, 17, 22, 23, 27, 29, 30, 35, 36, 37, 38, 55, 61, 63, 65, 66, 68, or 69. In some embodiments, the sequence selected from SEQ ID NOs: 5-72, 74-78, and 80-82 comprise a sequence, or two sequences, selected from SEQ ID NO: 5, 6, 9, 13, 14, 15, 16, 17, 22, 23, 27, 30, 35, 36, 37, 38, 55, 63, 65, 66, 68, or 69.

[0459] In some embodiments, the gRNA is a sgRNA comprising any one of the sequences shown in Table 2 (SEQ ID Nos. 87-124). In some embodiments, the gRNA is a sgRNA comprising any one of the sequences shown in Table 2 (SEQ ID Nos. 87-124, but without the modifications as shown (i.e., unmodified SEQ ID Nos. 87-124). In some embodiments, the sgRNA comprises a sequence that is at least 99%, 98%, 97%, 96%, 95%, 94%, 93%, 92%, 91%, or 90% identical to any of the nucleic acids of SEQ ID Nos. 87-124. In some embodiments, the sgRNA comprises a sequence that is at least 99%, 98%, 97%, 96%, 95%, 94%, 93%, 92%, 91%, or 90% identical to any of the nucleic acids of SEQ ID Nos. 87-124, but without the modifications as shown (i.e., unmodified SEQ ID Nos. 87-124). In some embodiments, the sgRNA comprises any one of the guide sequences shown in Table 1 in place of the guide sequences shown in the sgRNA sequences of Table 2 at SEQ ID Nos: 87-124, with or without the modifications.

[0460] In some embodiments, the gRNA is a sgRNA comprising any one of SEQ ID Nos. 87-113, 115-120, or 122-124. In some embodiments, the gRNA is a sgRNA comprising any one of SEQ ID Nos. 87-113, 115-120, or 122-124, but without the modifications as shown in Table 2 (i.e., unmodified SEQ ID Nos. 87-113, 115-120, or 122-124). In some embodiments, the sgRNA comprises a sequence that is at least 99%, 98%, 97%, 96%, 95%, 94%, 93%, 92%, 91%, or 90% identical to any of the nucleic acids of SEQ ID Nos. 87-113, 115-120, or 122-124. In some embodiments, the sgRNA comprises a sequence that is at least 99%, 98%, 97%, 96%, 95%, 94%, 93%, 92%, 91%, or 90% identical to any of the nucleic acids of SEQ ID Nos. 87-113, 115-120, or 122-124, but without the modifications as shown (i.e., unmodified SEQ ID Nos. 87-113, 115-120, or 122-124). In some embodiments, the sgRNA comprises any one of the guide sequences shown in Table 1 in place of the guide sequences shown in the sgRNA sequences of Table 2 at SEQ ID Nos: 87-113, 115-120, or 122-124, with or without the modifications.

[0461] The guide RNAs provided herein can be useful for recognizing (e.g., hybridizing to) a target sequence in the TTR gene. For example, the TTR target sequence may be recognized and cleaved by a provided Cas cleavase comprising a guide RNA. Thus, an RNA-guided DNA binding agent, such as a Cas cleavase, may be directed by a guide RNA to a target sequence of the TTR gene, where the guide sequence of the guide RNA hybridizes with the target sequence and the RNA-guided DNA binding agent, such as a Cas cleavase, cleaves the target sequence.

[0462] In some embodiments, the selection of the one or more guide RNAs is determined based on target sequences within the TTR gene.

[0463] Without being bound by any particular theory, mutations (e.g., frameshift mutations resulting from indels occurring as a result of a nuclease-mediated DSB) in certain regions of the gene may be less tolerable than mutations in other regions of the gene, thus the location of a DSB is an important factor in the amount or type of protein knockdown that may result. In some embodiments, a gRNA complementary or having complementarity to a target sequence within TTR is used to direct the RNA-guided DNA binding agent to a particular location in the TTR gene. In some embodiments, gRNAs are designed to have guide sequences that are complementary or have complementarity to target sequences in exon 1, exon 2, exon 3, or exon 4 of TTR.

[0464] In some embodiments, the guide sequence is at least 99%, 98%, 97%, 96%, 95%, 94%, 93%, 92%, 91%, or 90% identical to a target sequence present in the human TTR gene. In some embodiments, the target sequence may be complementary to the guide sequence of the guide RNA. In some embodiments, the degree of complementarity or identity between a guide sequence of a guide RNA and its corresponding target sequence may be at least 80%, 85%, 90%, 95%, 96%, 97%, 98%, 99%, or 100%. In some embodiments, the target sequence and the guide sequence of the gRNA may be 100% complementary or identical. In other embodiments, the target sequence and the guide sequence of the gRNA may contain at least one mismatch. For example, the target sequence and the guide sequence of the gRNA may contain 1, 2, 3, or 4 mismatches, where the total length of the guide sequence is 20. In some embodiments, the target sequence and the guide sequence of the gRNA may contain 1-4 mismatches where the guide sequence is 20 nucleotides.

[0465] C. Modifications of gRNAs

[0466] In some embodiments, the gRNA is chemically modified. A gRNA comprising one or more modified nucleosides or nucleotides is called a “modified” gRNA or “chemically modified” gRNA, to describe the presence of one or more non-naturally and/or naturally occurring components or configurations that are used instead of or in addition to the canonical A, G, C, and U residues. In some embodiments, a modified gRNA is synthesized with a non-canonical nucleoside or nucleotide, is here called “modified.” Modified nucleosides and nucleotides can include one or more of: (i) alteration, e.g., replacement, of one or both of the non-linking phosphate oxygens and/or of one or more of the linking phosphate oxygens in the phosphodiester backbone linkage (an exemplary backbone modification); (ii) alteration, e.g., replacement, of a constituent of the ribose sugar, e.g., of the 2′ hydroxyl on the ribose sugar (an exemplary sugar modification); (iii) wholesale replacement of the phosphate moiety with “dephospho” linkers (an exemplary backbone modification); (iv) modification or replacement of a naturally occurring nucleobase, including with a non-canonical nucleobase (an exemplary base modification); (v) replacement or modification of the ribose-phosphate backbone (an exemplary backbone modification); (vi) modification of the 3′ end or 5′ end of the oligonucleotide, e.g., removal, modification or replacement of a terminal phosphate group or conjugation of a moiety, cap or linker (such 3′ or 5′ cap modifications may comprise a sugar and/or backbone modification); and (vii) modification or replacement of the sugar (an exemplary sugar modification).

[0467] Chemical modifications such as those listed above can be combined to provide modified gRNAs comprising nucleosides and nucleotides (collectively “residues”) that can have two, three, four, or more modifications. For example, a modified residue can have a modified sugar and a modified nucleobase. In some embodiments, every base of a gRNA is modified, e.g., all bases have a modified phosphate group, such as a phosphorothioate group. In certain embodiments, all, or substantially all, of the phosphate groups of an gRNA molecule are replaced with phosphorothioate groups. In some embodiments, modified gRNAs comprise at least one modified residue at or near the 5′ end of the RNA. In some embodiments, modified gRNAs comprise at least one modified residue at or near the 3′ end of the RNA.

[0468] In some embodiments, the gRNA comprises one, two, three or more modified residues. In some embodiments, at least 5% (e.g., at least 5%, at least 10%, at least 15%, at least 20%, at least 25%, at least 30%, at least 35%, at least 40%, at least 45%, at least 50%, at least 55%, at least 60%, at least 65%, at least 70%, at least 75%, at least 80%, at least 85%, at least 90%, at least 95%, or 100%) of the positions in a modified gRNA are modified nucleosides or nucleotides.

[0469] Unmodified nucleic acids can be prone to degradation by, e.g., intracellular nucleases or those found in serum. For example, nucleases can hydrolyze nucleic acid phosphodiester bonds. Accordingly, in one aspect the gRNAs described herein can contain one or more modified nucleosides or nucleotides, e.g., to introduce stability toward intracellular or serum-based nucleases. In some embodiments, the modified gRNA molecules described herein can exhibit a reduced innate immune response when introduced into a population of cells, both in vivo and ex vivo. The term “innate immune response” includes a cellular response to exogenous nucleic acids, including single stranded nucleic acids, which involves the induction of cytokine expression and release, particularly the interferons, and cell death.

[0470] In some embodiments of a backbone modification, the phosphate group of a modified residue can be modified by replacing one or more of the oxygens with a different substituent. Further, the modified residue, e.g., modified residue present in a modified nucleic acid, can include the wholesale replacement of an unmodified phosphate moiety with a modified phosphate group as described herein. In some embodiments, the backbone modification of the phosphate backbone can include alterations that result in either an uncharged linker or a charged linker with unsymmetrical charge distribution.

[0471] Examples of modified phosphate groups include, phosphorothioate, phosphoroselenates, borano phosphates, borano phosphate esters, hydrogen phosphonates, phosphoroamidates, alkyl or aryl phosphonates and phosphotriesters. The phosphorous atom in an unmodified phosphate group is achiral. However, replacement of one of the nonbridging oxygens with one of the above atoms or groups of atoms can render the phosphorous atom chiral. The stereogenic phosphorous atom can possess either the “R” configuration (herein Rp) or the “S” configuration (herein Sp). The backbone can also be modified by replacement of a bridging oxygen, (i.e., the oxygen that links the phosphate to the nucleoside), with nitrogen (bridged phosphoroamidates), sulfur (bridged phosphorothioates) and carbon (bridged methylenephosphonates). The replacement can occur at either linking oxygen or at both of the linking oxygens.

[0472] The phosphate group can be replaced by non-phosphorus containing connectors in certain backbone modifications. In some embodiments, the charged phosphate group can be replaced by a neutral moiety. Examples of moieties which can replace the phosphate group can include, without limitation, e.g., methyl phosphonate, hydroxylamino, siloxane, carbonate, carboxymethyl, carbamate, amide, thioether, ethylene oxide linker, sulfonate, sulfonamide, thioformacetal, formacetal, oxime, methyleneimino, methylenemethylimino, methylenehydrazo, methylenedimethylhydrazo and methyleneoxymethylimino.

[0473] Scaffolds that can mimic nucleic acids can also be constructed wherein the phosphate linker and ribose sugar are replaced by nuclease resistant nucleoside or nucleotide surrogates. Such modifications may comprise backbone and sugar modifications. In some embodiments, the nucleobases can be tethered by a surrogate backbone. Examples can include, without limitation, the morpholino, cyclobutyl, pyrrolidine and peptide nucleic acid (PNA) nucleoside surrogates.

[0474] The modified nucleosides and modified nucleotides can include one or more modifications to the sugar group, i.e. at sugar modification. For example, the 2′ hydroxyl group (OH) can be modified, e.g. replaced with a number of different “oxy” or “deoxy” substituents. In some embodiments, modifications to the 2′ hydroxyl group can enhance the stability of the nucleic acid since the hydroxyl can no longer be deprotonated to form a 2′-alkoxide ion.

[0475] Examples of 2′ hydroxyl group modifications can include alkoxy or aryloxy (OR, wherein “R” can be, e.g., alkyl, cycloalkyl, aryl, aralkyl, heteroaryl or a sugar); polyethyleneglycols (PEG), O(CH₂CH₂O)ₙCH₂CH₂OR wherein R can be, e.g., H or optionally substituted alkyl, and n can be an integer from 0 to 20 (e.g., from 0 to 4, from 0 to 8, from 0 to 10, from 0 to 16, from 1 to 4, from 1 to 8, from 1 to 10, from 1 to 16, from 1 to 20, from 2 to 4, from 2 to 8, from 2 to 10, from 2 to 16, from 2 to 20, from 4 to 8, from 4 to 10, from 4 to 16, and from 4 to 20). In some embodiments, the 2′ hydroxyl group modification can be 2′-O-Me. In some embodiments, the 2′ hydroxyl group modification can be a 2′-fluoro modification, which replaces the 2′ hydroxyl group with a fluoride. In some embodiments, the 2′ hydroxyl group modification can include “locked” nucleic acids (LNA) in which the 2′ hydroxyl can be connected, e.g., by a C1-6 alkylene or C1-6 heteroalkylene bridge, to the 4′ carbon of the same ribose sugar, where exemplary bridges can include methylene, propylene, ether, or amino bridges; O-amino (wherein amino can be, e.g., NH₂; alkylamino, dialkylamino, heterocyclyl, arylamino, diarylamino, heteroarylamino, or diheteroarylamino, ethylenediamine, or polyamino) and aminoalkoxy, O(CH₂)ₙ-amino, (wherein amino can be, e.g., NH₂; alkylamino, dialkylamino, heterocyclyl, arylamino, diarylamino, heteroarylamino, or diheteroarylamino, ethylenediamine, or polyamino). In some embodiments, the 2′ hydroxyl group modification can included “unlocked” nucleic acids (UNA) in which the ribose ring lacks the C2′-C3′ bond. In some embodiments, the 2′ hydroxyl group modification can include the methoxyethyl group (MOE), (OCH₂CH₂OCH₃, e.g., a PEG derivative).

[0476] “Deoxy” 2′ modifications can include hydrogen (i.e. deoxyribose sugars, e.g., at the overhang portions of partially dsRNA); halo (e.g., bromo, chloro, fluoro, or iodo); amino (wherein amino can be, e.g., NH₂; alkylamino, dialkylamino, heterocyclyl, acylamino, diarylamino, heteroarylamino, diheteroarylamino, or amino acid); NH(CH₂CH₂NH)ₙCH₂CH₂-amino (wherein amino can be, e.g., as described herein), —NHC(O)R (wherein R can be, e.g., alkyl, cycloalkyl, aryl, aralkyl, heteroaryl or sugar), cyano; mercapto; alkyl-thio-alkyl; thioalkoxy; and alkyl, cycloalkyl, aryl, alkenyl and alkynyl, which may be optionally substituted with e.g., an amino as described herein.

[0477] The sugar modification can comprise a sugar group which may also contain one or more carbons that possess the opposite stereochemical configuration than that of the corresponding carbon in ribose. Thus, a modified nucleic acid can include nucleotides containing e.g., arabinose, as the sugar. The modified nucleic acids can also include abasic sugars. These abasic sugars can also be further modified at one or more of the constituent sugar atoms. The modified nucleic acids can also include one or more sugars that are in the L form, e.g. L-nucleosides.

[0478] The modified nucleosides and modified nucleotides described herein, which can be incorporated into a modified nucleic acid, can include a modified base, also called a nucleobase. Examples of nucleobases include, but are not limited to, adenine (A), guanine (G), cytosine (C), and uracil (U). These nucleobases can be modified or wholly replaced to provide modified residues that can be incorporated into modified nucleic acids. The nucleobase of the nucleotide can be independently selected from a purine, a pyrimidine, a purine analog, or pyrimidine analog. In some embodiments, the nucleobase can include, for example, naturally-occurring and synthetic derivatives of a base.

[0479] In embodiments employing a dual guide RNA, each of the crRNA and the tracr RNA can contain modifications. Such modifications may be at one or both ends of the crRNA and/or tracr RNA. In embodiments comprising an sgRNA, one or more residues at one or both ends of the sgRNA may be chemically modified, or the entire sgRNA may be chemically modified. Certain embodiments comprise a 5′ end modification. Certain embodiments comprise a 3′ end modification. In certain embodiments, one or more or all of the nucleotides in single stranded overhang of a guide RNA molecule are deoxynucleotides.

[0480] In some embodiments, the guide RNAs disclosed herein comprise one of the modification patterns disclosed in U.S. 62/431,756, filed Dec. 8, 2016, titled “Chemically Modified Guide RNAs,” the contents of which are hereby incorporated by reference in their entirety.

[0481] In some embodiments, the invention comprises a gRNA comprising one or more modifications. In some embodiments, the modification comprises a 2′-O-methyl (2′-O-Me) modified nucleotide. In some embodiments, the modification comprises a phosphorothioate (PS) bond between nucleotides.

[0482] The terms “mA,” “mC,” “mU,” or “mG” may be used to denote a nucleotide that has been modified with 2′-O-Me.

[0483] Modification of 2′-O-methyl can be depicted as follows:

[chemical structure]

[0484] Another chemical modification that has been shown to influence nucleotide sugar rings is halogen substitution. For example, 2′-fluoro (2′-F) substitution on nucleotide sugar rings can increase oligonucleotide binding affinity and nuclease stability.

[0485] In this application, the terms “fA,” “fC,” “fU,” or “fG” may be used to denote a nucleotide that has been substituted with 2′-F.

[0486] Substitution of 2′-F can be depicted as follows:

[chemical structure]

[0487] Phosphorothioate (PS) linkage or bond refers to a bond where a sulfur is substituted for one nonbridging phosphate oxygen in a phosphodiester linkage, for example in the bonds between nucleotides bases. When phosphorothioates are used to generate oligonucleotides, the modified oligonucleotides may also be referred to as S-oligos.

[0488] A “*” may be used to depict a PS modification. In this application, the terms A*, C*, U*, or G* may be used to denote a nucleotide that is linked to the next (e.g., 3′) nucleotide with a PS bond.

[0489] In this application, the terms “mA*,” “mC*,” “mU*,” or “mG*” may be used to denote a nucleotide that has been substituted with 2′-O-Me and that is linked to the next (e.g., 3′) nucleotide with a PS bond.

[0490] The diagram below shows the substitution of S— into a nonbridging phosphate oxygen, generating a PS bond in lieu of a phosphodiester bond:

[chemical structure]

[0491] Abasic nucleotides refer to those which lack nitrogenous bases. The figure below depicts an oligonucleotide with an abasic (also known as apurinic) site that lacks a base:

[chemical structure]

[0492] Inverted bases refer to those with linkages that are inverted from the normal 5′ to 3′ linkage (i.e., either a 5′ to 5′ linkage or a 3′ to 3′ linkage). For example:

[chemical structure]

[0493] An abasic nucleotide can be attached with an inverted linkage. For example, an abasic nucleotide may be attached to the terminal 5′ nucleotide via a 5′ to 5′ linkage, or an abasic nucleotide may be attached to the terminal 3′ nucleotide via a 3′ to 3′ linkage. An inverted abasic nucleotide at either the terminal 5′ or 3′ nucleotide may also be called an inverted abasic end cap.

[0494] In some embodiments, one or more of the first three, four, or five nucleotides at the 5′ terminus, and one or more of the last three, four, or five nucleotides at the 3′ terminus are modified. In some embodiments, the modification is a 2′-O-Me, 2′-F, inverted abasic nucleotide, PS bond, or other nucleotide modification well known in the art to increase stability and/or performance.

[0495] In some embodiments, the first four nucleotides at the 5′ terminus, and the last four nucleotides at the 3′ terminus are linked with phosphorothioate (PS) bonds.

[0496] In some embodiments, the first three nucleotides at the 5′ terminus, and the last three nucleotides at the 3′ terminus comprise a 2′-O-methyl (2′-O-Me) modified nucleotide. In some embodiments, the first three nucleotides at the 5′ terminus, and the last three nucleotides at the 3′ terminus comprise a 2′-fluoro (2′-F) modified nucleotide. In some embodiments, the first three nucleotides at the 5′ terminus, and the last three nucleotides at the 3′ terminus comprise an inverted abasic nucleotide.

[0497] In some embodiments, the guide RNA comprises a modified sgRNA. In some embodiments, the sgRNA comprises the modification pattern shown in SEQ ID No: 3, where N is any natural or non-natural nucleotide, and where the totality of the N's comprise a guide sequence that directs a nuclease to a target sequence.

[0498] In some embodiments, the guide RNA comprises a sgRNA shown in any one of SEQ ID No: 87-124. In some embodiments, the guide RNA comprises a sgRNA comprising any one of the guide sequences of SEQ ID No: 5-82 and the nucleotides of SEQ ID No: 125, wherein the nucleotides of SEQ ID No: 125 are on the 3′ end of the guide sequence, and wherein the guide sequence may be modified as shown in SEQ ID No: 3.

[0499] In some embodiments, the guide RNA comprises a sgRNA comprising a guide sequence selected from SEQ ID Nos: 5-72, 74-78, and 80-82 and nucleotides 21-100 of SEQ ID No: 3, wherein the nucleotides of SEQ ID No: 3 are on the 3′ end of the guide sequence, and wherein the guide sequence may be modified as shown in SEQ ID No: 3.

[0500] D. RNA-Guided DNA Binding Agent

[0501] In some embodiments, the RNA-guided DNA-binding agent is a Class 2 Cas nuclease. In some embodiments, the RNA-guided DNA-binding agent has cleavase activity, which can also be referred to as double-strand endonuclease activity. In some embodiments, the RNA-guided DNA-binding agent comprises a Cas nuclease, such as a Class 2 Cas nuclease (which may be, e.g., a Cas nuclease of Type II, V, or VI). Class 2 Cas nucleases include, for example, Cas9, Cpf1, C2c1, C2c2, and C2c3 proteins and modifications thereof. Examples of Cas9 nucleases include those of the type II CRISPR systems of S. pyogenes, S. aureus, and other prokaryotes (see, e.g., the list in the next paragraph), and modified (e.g., engineered or mutant) versions thereof. See, e.g., US2016/0312198 A1; US 2016/0312199 A1. Other examples of Cas nucleases include a Csm or Cmr complex of a type III CRISPR system or the Cas10, Csm1, or Cmr2 subunit thereof and a Cascade complex of a type I CRISPR system, or the Cas3 subunit thereof. In some embodiments, the Cas nuclease may be from a Type-IIA, Type-IIB, or Type-IIC system. For discussion of various CRISPR systems and Cas nucleases see, e.g., Makarova et al., Nat. Rev. Microbiol. 9:467-477 (2011); Makarova et al., Nat. Rev. Microbiol, 13: 722-36 (2015); Shmakov et al., Molecular Cell, 60:385-397 (2015). In some embodiments, the RNA-guided DNA binding agent is a Cas cleavase, e.g. a Cas9 cleavase. In some embodiments, the RNA-guided DNA binding agent is a Cas nickase, e.g. a Cas9 nickase. In some embodiments, the RNA-guided DNA binding agent is a Cas9 nuclease, such as a cleavase or nickase. In some embodiments, the RNA-guided DNA binding agent is an S. pyogenes Cas9 nuclease, e.g. a cleavase.

[0502] Non-limiting exemplary species that the Cas nuclease can be derived from include Streptococcus pyogenes, Streptococcus thermophilus, Streptococcus sp., Staphylococcus aureus, Listeria innocua, Lactobacillus gasseri, Francisella novicida, Wolinella succinogenes, Sutterella wadsworthensis, Gammaproteobacterium, Neisseria meningitidis, Campylobacter jejuni, Pasteurella multocida, Fibrobacter succinogene, Rhodospirillum rubrum, Nocardiopsis dassonvillei, Streptomyces pristinaespiralis, Streptomyces viridochromogenes, Streptomyces viridochromogenes, Streptosporangium roseum, Streptosporangium roseum, Alicyclobacillus acidocaldarius, Bacillus pseudomycoides, Bacillus selenitireducens, Exiguobacterium sibiricum, Lactobacillus delbrueckii, Lactobacillus salivarius, Lactobacillus buchneri, Treponema denticola, Microscilla marina, Burkholderiales bacterium, Polaromonas naphthalenivorans, Polaromonas sp., Crocosphaera watsonii, Cyanothece sp., Microcystis aeruginosa, Synechococcus sp., Acetohalobium arabaticum, Ammonifex degensii, Caldicelulosiruptor becscii, Candidatus Desulforudis, Clostridium botulinum, Clostridium difficile, Finegoldia magna, Natranaerobius thermophilus, Pelotomaculum thermopropionicum, Acidithiobacillus caldus, Acidithiobacillus ferrooxidans, Allochromatium vinosum, Marinobacter sp., Nitrosococcus halophilus, Nitrosococcus watsoni, Pseudoalteromonas haloplanktis, Ktedonobacter racemifer, Methanohalobium evestigatum, Anabaena variabilis, Nodularia spumigena, Nostoc sp., Arthrospira maxima, Arthrospira platensis, Arthrospira sp., Lyngbya sp., Microcoleus chthonoplastes, Oscillatoria sp., Petrotoga mobilis, Thermosipho africanus, Streptococcus pasteurianus, Neisseria cinerea, Campylobacter lari, Parvibaculum lavamentivorans, Corynebacterium diphtheria, Acidaminococcus sp., Lachnospiraceae bacterium ND2006, and Acaryochloris marina.

[0503] In some embodiments, the Cas nuclease is the Cas9 nuclease from Streptococcus pyogenes. In some embodiments, the Cas nuclease is the Cas9 nuclease from Streptococcus thermophilus. In some embodiments, the Cas nuclease is the Cas9 nuclease from Neisseria meningitidis. In some embodiments, the Cas nuclease is the Cas9 nuclease is from Staphylococcus aureus. In some embodiments, the Cas nuclease is the Cpf1 nuclease from Francisella novicida. In some embodiments, the Cas nuclease is the Cpf1 nuclease from Acidaminococcus sp. In some embodiments, the Cas nuclease is the Cpf1 nuclease from Lachnospiraceae bacterium ND2006. In further embodiments, the Cas nuclease is the Cpf1 nuclease from Francisella tularensis, Lachnospiraceae bacterium, Butyrivibrio proteoclasticus, Peregrinibacteria bacterium, Parcubacteria bacterium, Smithella, Acidaminococcus, Candidatus Methanoplasma termitum, Eubacterium eligens, Moraxella bovoculi, Leptospira inadai, Porphyromonas crevioricanis, Prevotella disiens, or Porphyromonas macacae. In certain embodiments, the Cas nuclease is a Cpf1 nuclease from an Acidaminococcus or Lachnospiraceae.

[0504] Wild type Cas9 has two nuclease domains: RuvC and HNH. The RuvC domain cleaves the non-target DNA strand, and the HNH domain cleaves the target strand of DNA. In some embodiments, the Cas9 nuclease comprises more than one RuvC domain and/or more than one HNH domain. In some embodiments, the Cas9 nuclease is a wild type Cas9. In some embodiments, the Cas9 is capable of inducing a double strand break in target DNA. In certain embodiments, the Cas nuclease may cleave dsDNA, it may cleave one strand of dsDNA, or it may not have DNA cleavase or nickase activity. An exemplary Cas9 amino acid sequence is provided as SEQ ID NO: 203. An exemplary Cas9 mRNA ORF sequence, which includes start and stop codons, is provided as SEQ ID NO: 311. An exemplary Cas9 mRNA coding sequence, suitable for inclusion in a fusion protein, is provided as SEQ ID NO: 210.

[0505] In some embodiments, chimeric Cas nucleases are used, where one domain or region of the protein is replaced by a portion of a different protein. In some embodiments, a Cas nuclease domain may be replaced with a domain from a different nuclease such as Fok1. In some embodiments, a Cas nuclease may be a modified nuclease.

[0506] In other embodiments, the Cas nuclease may be from a Type-I CRISPR/Cas system. In some embodiments, the Cas nuclease may be a component of the Cascade complex of a Type-I CRISPR/Cas system. In some embodiments, the Cas nuclease may be a Cas3 protein. In some embodiments, the Cas nuclease may be from a Type-III CRISPR/Cas system. In some embodiments, the Cas nuclease may have an RNA cleavage activity.

[0507] In some embodiments, the RNA-guided DNA-binding agent has single-strand nickase activity, i.e., can cut one DNA strand to produce a single-strand break, also known as a “nick.” In some embodiments, the RNA-guided DNA-binding agent comprises a Cas nickase. A nickase is an enzyme that creates a nick in dsDNA, i.e., cuts one strand but not the other of the DNA double helix. In some embodiments, a Cas nickase is a version of a Cas nuclease (e.g., a Cas nuclease discussed above) in which an endonucleolytic active site is inactivated, e.g., by one or more alterations (e.g., point mutations) in a catalytic domain. See, e.g., U.S. Pat. No. 8,889,356 for discussion of Cas nickases and exemplary catalytic domain alterations. In some embodiments, a Cas nickase such as a Cas9 nickase has an inactivated RuvC or HNH domain. An exemplary Cas9 nickase amino acid sequence is provided as SEQ ID NO: 206. An exemplary Cas9 nickase mRNA ORF sequence, which includes start and stop codons, is provided as SEQ ID NO: 207. An exemplary Cas9 nickase mRNA coding sequence, suitable for inclusion in a fusion protein, is provided as SEQ ID NO: 211.

[0508] In some embodiments, the RNA-guided DNA-binding agent is modified to contain only one functional nuclease domain. For example, the agent protein may be modified such that one of the nuclease domains is mutated or fully or partially deleted to reduce its nucleic acid cleavage activity. In some embodiments, a nickase is used having a RuvC domain with reduced activity. In some embodiments, a nickase is used having an inactive RuvC domain. In some embodiments, a nickase is used having an HNH domain with reduced activity. In some embodiments, a nickase is used having an inactive HNH domain.

[0509] In some embodiments, a conserved amino acid within a Cas protein nuclease domain is substituted to reduce or alter nuclease activity. In some embodiments, a Cas nuclease may comprise an amino acid substitution in the RuvC or RuvC-like nuclease domain. Exemplary amino acid substitutions in the RuvC or RuvC-like nuclease domain include D10A (based on the S. pyogenes Cas9 protein). See, e.g., Zetsche et al. (2015) Cell October 22:163(3): 759-771. In some embodiments, the Cas nuclease may comprise an amino acid substitution in the HNH or HNH-like nuclease domain. Exemplary amino acid substitutions in the HNH or HNH-like nuclease domain include E762A, H840A, N863A, H983A, and D986A (based on the S. pyogenes Cas9 protein). See, e.g., Zetsche et al. (2015). Further exemplary amino acid substitutions include D917A, E1006A, and D1255A (based on the Francisella novicida U112 Cpf1 (FnCpf1) sequence (UniProtKB-A0Q7Q2 (CPF1_FRATN)).

[0510] In some embodiments, a nucleic acid encoding a nickase is provided in combination with a pair of guide RNAs that are complementary to the sense and antisense strands of the target sequence, respectively. In this embodiment, the guide RNAs direct the nickase to a target sequence and introduce a DSB by generating a nick on opposite strands of the target sequence (i.e., double nicking). In some embodiments, use of double nicking may improve specificity and reduce off-target effects. In some embodiments, a nickase is used together with two separate guide RNAs targeting opposite strands of DNA to produce a double nick in the target DNA. In some embodiments, a nickase is used together with two separate guide RNAs that are selected to be in close proximity to produce a double nick in the target DNA.

[0511] In some embodiments, the RNA-guided DNA-binding agent lacks cleavase and nickase activity. In some embodiments, the RNA-guided DNA-binding agent comprises a dCas DNA-binding polypeptide. A dCas polypeptide has DNA-binding activity while essentially lacking catalytic (cleavase/nickase) activity. In some embodiments, the dCas polypeptide is a dCas9 polypeptide. In some embodiments, the RNA-guided DNA-binding agent lacking cleavase and nickase activity or the dCas DNA-binding polypeptide is a version of a Cas nuclease (e.g., a Cas nuclease discussed above) in which its endonucleolytic active sites are inactivated, e.g., by one or more alterations (e.g., point mutations) in its catalytic domains. See, e.g., US 2014/0186958 A1; US 2015/0166980 A1. An exemplary dCas9 amino acid sequence is provided as SEQ ID NO: 208. An exemplary dCas9 mRNA ORF sequence, which includes start and stop codons, is provided as SEQ ID NO: 209. An exemplary dCas9 mRNA coding sequence, suitable for inclusion in a fusion protein, is provided as SEQ ID NO: 346.

[0512] a) Heterologous Functional Domains; Nuclear Localization Signals

[0513] In some embodiments, the RNA-guided DNA-binding agent, e.g. a Cas9 nuclease such as an S. pyogenes Cas9, comprises one or more heterologous functional domains (e.g., is or comprises a fusion polypeptide).

[0514] In some embodiments, the heterologous functional domain may facilitate transport of the RNA-guided DNA-binding agent into the nucleus of a cell. For example, the heterologous functional domain may be a nuclear localization signal (NLS). In some embodiments, the RNA-guided DNA-binding agent may be fused with 1-10 NLS(s). In some embodiments, the RNA-guided DNA-binding agent may be fused with 1-5 NLS(s). In some embodiments, the RNA-guided DNA-binding agent may be fused with one NLS. Where one NLS is used, the NLS may be linked at the N-terminus or the C-terminus of the RNA-guided DNA-binding agent sequence. In some embodiments, the RNA-guided DNA-binding agent may be fused C-terminally to at least one NLS. An NLS may also be inserted within the RNA-guided DNA binding agent sequence. In other embodiments, the RNA-guided DNA-binding agent may be fused with more than one NLS. In some embodiments, the RNA-guided DNA-binding agent may be fused with 2, 3, 4, or 5 NLSs. In some embodiments, the RNA-guided DNA-binding agent may be fused with two NLSs. In certain circumstances, the two NLSs may be the same (e.g., two SV40 NLSs) or different. In some embodiments, the RNA-guided DNA-binding agent is fused to two SV40 NLS sequences linked at the carboxy terminus. In some embodiments, the RNA-guided DNA-binding agent may be fused with two NLSs, one linked at the N-terminus and one at the C-terminus. In some embodiments, the RNA-guided DNA-binding agent may be fused with 3 NLSs. In some embodiments, the RNA-guided DNA-binding agent may be fused with no NLS. In some embodiments, the NLS may be a monopartite sequence, such as, e.g., the SV40 NLS, PKKKRKV (SEQ ID NO: 278) or PKKKRRV (SEQ ID NO: 290). In some embodiments, the NLS may be a bipartite sequence, such as the NLS of nucleoplasmin, KRPAATKKAGQAKKKK (SEQ ID NO: 91). In some embodiments, the NLS sequence may comprise LAAKRSRTT (SEQ ID NO: 279), QAAKRSRTT (SEQ ID NO: 280), PAPAKRERTT (SEQ ID NO: 281), QAAKRPRTT (SEQ ID NO: 282), RAAKRPRTT (SEQ ID NO: 283), AAAKRSWSMAA (SEQ ID NO: 284), AAAKRVWSMAF (SEQ ID NO: 285), AAAKRSWSMAF (SEQ ID NO: 286), AAAKRKYFAA (SEQ ID NO: 287), RAAKRKAFAA (SEQ ID NO: 288), or RAAKRKYFAV (SEQ ID NO: 289). In a specific embodiment, a single PKKKRKV (SEQ ID NO: 278) NLS may be linked at the C-terminus of the RNA-guided DNA-binding agent. One or more linkers are optionally included at the fusion site. In some embodiments, one or more NLS(s) according to any of the foregoing embodiments are present in the RNA-guided DNA-binding agent in combination with one or more additional heterologous functional domains, such as any of the heterologous functional domains described below.

[0515] In some embodiments, the heterologous functional domain may be capable of modifying the intracellular half-life of the RNA-guided DNA binding agent. In some embodiments, the half-life of the RNA-guided DNA binding agent may be increased. In some embodiments, the half-life of the RNA-guided DNA-binding agent may be reduced. In some embodiments, the heterologous functional domain may be capable of increasing the stability of the RNA-guided DNA-binding agent. In some embodiments, the heterologous functional domain may be capable of reducing the stability of the RNA-guided DNA-binding agent. In some embodiments, the heterologous functional domain may act as a signal peptide for protein degradation. In some embodiments, the protein degradation may be mediated by proteolytic enzymes, such as, for example, proteasomes, lysosomal proteases, or calpain proteases. In some embodiments, the heterologous functional domain may comprise a PEST sequence. In some embodiments, the RNA-guided DNA-binding agent may be modified by addition of ubiquitin or a polyubiquitin chain. In some embodiments, the ubiquitin may be a ubiquitin-like protein (UBL). Non-limiting examples of ubiquitin-like proteins include small ubiquitin-like modifier (SUMO), ubiquitin cross-reactive protein (UCRP, also known as interferon-stimulated gene-15 (ISG15)), ubiquitin-related modifier-1 (URM1), neuronal-precursor-cell-expressed developmentally downregulated protein-8 (NEDD8, also called Rubl in S. cerevisiae), human leukocyte antigen F-associated (FAT10), autophagy-8 (ATG8) and -12 (ATG12), Fau ubiquitin-like protein (FUB1), membrane-anchored UBL (MUB), ubiquitin fold-modifier-1 (UFM1), and ubiquitin-like protein-5 (UBL5).

[0516] In some embodiments, the heterologous functional domain may be a marker domain. Non-limiting examples of marker domains include fluorescent proteins, purification tags, epitope tags, and reporter gene sequences. In some embodiments, the marker domain may be a fluorescent protein. Non-limiting examples of suitable fluorescent proteins include green fluorescent proteins (e.g., GFP, GFP-2, tagGFP, turboGFP, sfGFP, EGFP, Emerald, Azami Green, Monomeric Azami Green, CopGFP, AceGFP, ZsGreen1), yellow fluorescent proteins (e.g., YFP, EYFP, Citrine, Venus, YPet, PhiYFP, ZsYellow1), blue fluorescent proteins (e.g., EBFP, EBFP2, Azurite, mKalamal, GFPuv, Sapphire, T-sapphire), cyan fluorescent proteins (e.g., ECFP, Cerulean, CyPet, AmCyan1, Midoriishi-Cyan), red fluorescent proteins (e.g., mKate, mKate2, mPlum, DsRed monomer, mCherry, mRFP1, DsRed-Express, DsRed2, DsRed-Monomer, HcRed-Tandem, HcRed1, AsRed2, eqFP611, mRasberry, mStrawberry, Jred), and orange fluorescent proteins (mOrange, mKO, Kusabira-Orange, Monomeric Kusabira-Orange, mTangerine, tdTomato) or any other suitable fluorescent protein. In other embodiments, the marker domain may be a purification tag and/or an epitope tag. Non-limiting exemplary tags include glutathione-S-transferase (GST), chitin binding protein (CBP), maltose binding protein (MBP), thioredoxin (TRX), poly(NANP), tandem affinity purification (TAP) tag, myc, AcV5, AU1, AU5, E, ECS, E2, FLAG, HA, nus, Softag 1, Softag 3, Strep, SBP, Glu-Glu, HSV, KT3, S, 51, T7, V5, VSV-G, 6×His, 8×His, biotin carboxyl carrier protein (BCCP), poly-His, and calmodulin. Non-limiting exemplary reporter genes include glutathione-S-transferase (GST), horseradish peroxidase (HRP), chloramphenicol acetyltransferase (CAT), beta-galactosidase, beta-glucuronidase, luciferase, or fluorescent proteins.

[0517] In additional embodiments, the heterologous functional domain may target the RNA-guided DNA-binding agent to a specific organelle, cell type, tissue, or organ. In some embodiments, the heterologous functional domain may target the RNA-guided DNA-binding agent to mitochondria.

[0518] In further embodiments, the heterologous functional domain may be an effector domain. When the RNA-guided DNA-binding agent is directed to its target sequence, e.g., when a Cas nuclease is directed to a target sequence by a gRNA, the effector domain may modify or affect the target sequence. In some embodiments, the effector domain may be chosen from a nucleic acid binding domain, a nuclease domain (e.g., a non-Cas nuclease domain), an epigenetic modification domain, a transcriptional activation domain, or a transcriptional repressor domain. In some embodiments, the heterologous functional domain is a nuclease, such as a FokI nuclease. See, e.g., U.S. Pat. No. 9,023,649. In some embodiments, the heterologous functional domain is a transcriptional activator or repressor. See, e.g., Qi et al., “Repurposing CRISPR as an RNA-guided platform for sequence-specific control of gene expression,” Cell 152:1173-83 (2013); Perez-Pinera et al., “RNA-guided gene activation by CRISPR-Cas9-based transcription factors,” Nat. Methods 10:973-6 (2013); Mali et al., “CAS9 transcriptional activators for target specificity screening and paired nickases for cooperative genome engineering,” Nat. Biotechnol. 31:833-8 (2013); Gilbert et al., “CRISPR-mediated modular RNA-guided regulation of transcription in eukaryotes,” Cell 154:442-51 (2013). As such, the RNA-guided DNA-binding agent essentially becomes a transcription factor that can be directed to bind a desired target sequence using a guide RNA. In certain embodiments, the DNA modification domain is a methylation domain, such as a demethylation or methyltransferase domain. In certain embodiments, the effector domain is a DNA modification domain, such as a base-editing domain. In particular embodiments, the DNA modification domain is a nucleic acid editing domain that introduces a specific modification into the DNA, such as a deaminase domain. See, e.g., WO 2015/089406; US 2016/0304846. The nucleic acid editing domains, deaminase domains, and Cas9 variants described in WO 2015/089406 and US 2016/0304846 are hereby incorporated by reference.

[0519] E. Nucleic Acid Comprising an Open Reading Frame Encoding an RNA-Guided DNA Binding Agent

[0520] Any nucleic acid comprising an ORF encoding an RNA-guided DNA binding agent disclosed herein, e.g. a Cas9 nuclease such as an S. pyogenes Cas9, may be optionally combined in a composition or method with any of the gRNAs disclosed herein. In any of the embodiments set forth herein, the nucleic acid comprising an open reading frame encoding an RNA-guided DNA binding agent may be an mRNA.

[0521] 1. ORFs with Low Adenine Content

[0522] In some embodiments, the ORF encoding the RNA-guided DNA-binding agent, e.g. a Cas9 nuclease such as an S. pyogenes Cas9, has an adenine content ranging from its minimum adenine content to about 150% of its minimum adenine content. In some embodiments, the adenine content of the ORF is less than or equal to about 145%, 140%, 135%, 130%, 125%, 120%, 115%, 110%, 105%, 104%, 103%, 102%, or 101% of its minimum adenine content. In some embodiments, the ORF has an adenine content equal to its minimum adenine content. In some embodiments, the ORF has an adenine content less than or equal to about 150% of its minimum adenine content. In some embodiments, the ORF has an adenine content less than or equal to about 145% of its minimum adenine content. In some embodiments, the ORF has an adenine content less than or equal to about 140% of its minimum adenine content. In some embodiments, the ORF has an adenine content less than or equal to about 135% of its minimum adenine content. In some embodiments, the ORF has an adenine content less than or equal to about 130% of its minimum adenine content. In some embodiments, the ORF has an adenine content less than or equal to about 125% of its minimum adenine content. In some embodiments, the ORF has an adenine content less than or equal to about 120% of its minimum adenine content. In some embodiments, the ORF has an adenine content less than or equal to about 115% of its minimum adenine content. In some embodiments, the ORF has an adenine content less than or equal to about 110% of its minimum adenine content. In some embodiments, the ORF has an adenine content less than or equal to about 105% of its minimum adenine content. In some embodiments, the ORF has an adenine content less than or equal to about 104% of its minimum adenine content. In some embodiments, the ORF has an adenine content less than or equal to about 103% of its minimum adenine content. In some embodiments, the ORF has an adenine content less than or equal to about 102% of its minimum adenine content. In some embodiments, the ORF has an adenine content less than or equal to about 101% of its minimum adenine content.

[0523] In some embodiments, the ORF has an adenine dinucleotide content ranging from its minimum adenine dinucleotide content to 200% of its minimum adenine dinucleotide content. In some embodiments, the adenine dinucleotide content of the ORF is less than or equal to about 195%, 190%, 185%, 180%, 175%, 170%, 165%, 160%, 155%, 150%, 145%, 140%, 135%, 130%, 125%, 120%, 115%, 110%, 105%, 104%, 103%, 102%, or 101% of its minimum adenine dinucleotide content. In some embodiments, the ORF has an adenine dinucleotide content equal to its minimum adenine dinucleotide content. In some embodiments, the ORF has an adenine dinucleotide content less than or equal to about 200% of its minimum adenine dinucleotide content. In some embodiments, the ORF has an adenine dinucleotide content less than or equal to about 195% of its minimum adenine dinucleotide content. In some embodiments, the ORF has an adenine dinucleotide content less than or equal to about 190% of its minimum adenine dinucleotide content. In some embodiments, the ORF has an adenine dinucleotide content less than or equal to about 185% of its minimum adenine dinucleotide content. In some embodiments, the ORF has an adenine dinucleotide content less than or equal to about 180% of its minimum adenine dinucleotide content. In some embodiments, the ORF has an adenine dinucleotide content less than or equal to about 175% of its minimum adenine dinucleotide content. In some embodiments, the ORF has an adenine dinucleotide content less than or equal to about 170% of its minimum adenine dinucleotide content. In some embodiments, the ORF has an adenine dinucleotide content less than or equal to about 165% of its minimum adenine dinucleotide content. In some embodiments, the ORF has an adenine dinucleotide content less than or equal to about 160% of its minimum adenine dinucleotide content. In some embodiments, the ORF has an adenine dinucleotide content less than or equal to about 155% of its minimum adenine dinucleotide content. In some embodiments, the ORF has an adenine dinucleotide content equal to its minimum adenine dinucleotide content. In some embodiments, the ORF has an adenine dinucleotide content less than or equal to about 150% of its minimum adenine dinucleotide content. In some embodiments, the ORF has an adenine dinucleotide content less than or equal to about 145% of its minimum adenine dinucleotide content. In some embodiments, the ORF has an adenine dinucleotide content less than or equal to about 140% of its minimum adenine dinucleotide content. In some embodiments, the ORF has an adenine dinucleotide content less than or equal to about 135% of its minimum adenine dinucleotide content. In some embodiments, the ORF has an adenine dinucleotide content less than or equal to about 130% of its minimum adenine dinucleotide content. In some embodiments, the ORF has an adenine dinucleotide content less than or equal to about 125% of its minimum adenine dinucleotide content. In some embodiments, the ORF has an adenine dinucleotide content less than or equal to about 120% of its minimum adenine dinucleotide content. In some embodiments, the ORF has an adenine dinucleotide content less than or equal to about 115% of its minimum adenine dinucleotide content. In some embodiments, the ORF has an adenine dinucleotide content less than or equal to about 110% of its minimum adenine dinucleotide content. In some embodiments, the ORF has an adenine dinucleotide content less than or equal to about 105% of its minimum adenine dinucleotide content. In some embodiments, the ORF has an adenine dinucleotide content less than or equal to about 104% of its minimum adenine dinucleotide content. In some embodiments, the ORF has an adenine dinucleotide content less than or equal to about 103% of its minimum adenine dinucleotide content. In some embodiments, the ORF has an adenine dinucleotide content less than or equal to about 102% of its minimum adenine dinucleotide content. In some embodiments, the ORF has an adenine dinucleotide content less than or equal to about 101% of its minimum adenine dinucleotide content.

[0524] In some embodiments, the ORF has an adenine dinucleotide content ranging from its minimum adenine dinucleotide content to the adenine dinucleotide content that is 90% or lower of the maximum adenine dinucleotide content of a reference sequence that encodes the same protein as the mRNA in question. In some embodiments, the adenine dinucleotide content of the ORF is less than or equal to about 85%, 80%, 75%, 70%, 65%, 60%, 55%, 50%, 45%, 40%, 35%, 30%, 25%, 20%, 15%, 10%, or 5% of the maximum adenine dinucleotide content of a reference sequence that encodes the same protein as the mRNA in question.

[0525] In some embodiments, the ORF has an adenine trinucleotide content ranging from 0 adenine trinucleotides to 1, 2, 3, 4, 5, 6, 7, 8, 9, 10, 20, 30, 40, or 50 adenine trinucleotides (where a longer run of adenines counts as the number of unique three-adenine segments within it, e.g., an adenine tetranucleotide contains two adenine trinucleotides, an adenine pentanucleotide contains three adenine trinucleotides, etc.). In some embodiments, the ORF has an adenine trinucleotide content ranging from 0% adenine trinucleotides to 0.1%, 0.2%, 0.3%, 0.4%, 0.5%, 0.6%, 0.7%, 0.8%, 0.9%, 1%, 1.5%, or 2% adenine trinucleotides, where the percentage content of adenine trinucleotides is calculated as the percentage of positions in a sequence that are occupied by adenines that form part of an adenine trinucleotide (or longer run of adenines), such that the sequences UUUAAA and UUUUAAAA would each have an adenine trinucleotide content of 50%. For example, in some embodiments, the ORF has an adenine trinucleotide content less than or equal to 2%. For example, in some embodiments, the ORF has an adenine trinucleotide content less than or equal to 1.5%. In some embodiments, the ORF has an adenine trinucleotide content less than or equal to 1%. In some embodiments, the ORF has an adenine trinucleotide content less than or equal to 0.9%. In some embodiments, the ORF has an adenine trinucleotide content less than or equal to 0.8%. In some embodiments, the ORF has an adenine trinucleotide content less than or equal to 0.7%. In some embodiments, the ORF has an adenine trinucleotide content less than or equal to 0.6%. In some embodiments, the ORF has an adenine trinucleotide content less than or equal to 0.5%. In some embodiments, the ORF has an adenine trinucleotide content less than or equal to 0.4%. In some embodiments, the ORF has an adenine trinucleotide content less than or equal to 0.3%. In some embodiments, the ORF has an adenine trinucleotide content less than or equal to 0.2%. In some embodiments, the ORF has an adenine trinucleotide content less than or equal to 0.1%. In some embodiments, a nucleic acid is provided that encodes an RNA-guided DNA-binding agent comprising an ORF containing no adenine trinucleotides.

[0526] In some embodiments, the ORF has an adenine trinucleotide content ranging from its minimum adenine trinucleotide content to the adenine trinucleotide content that is 90% or lower of the maximum adenine trinucleotide content of a reference sequence that encodes the same protein as the mRNA in question. In some embodiments, the adenine trinucleotide content of the ORF is less than or equal to about 85%, 80%, 75%, 70%, 65%, 60%, 55%, 50%, 45%, 40%, 35%, 30%, 25%, 20%, 15%, 10%, or 5% of the maximum adenine trinucleotide content of a reference sequence that encodes the same protein as the mRNA in question.

[0527] A given ORF can be reduced in adenine content or adenine dinucleotide content or adenine trinucleotide content, for example, by using minimal adenine codons in a sufficient fraction of the ORF. For example, an amino acid sequence for an RNA-guided DNA-binding agent can be back-translated into an ORF sequence by converting amino acids to codons, wherein some or all of the ORF uses the exemplary minimal adenine codons shown below. In some embodiments, at least about 50%, 55%, 60%, 65%, 70%, 75%, 80%, 85%, 90%, 95%, 98%, 99%, or 100% of the codons in the ORF are codons listed in Table 4.

TABLE 4
Exemplary minimal adenine codons

| | Amino Acid | Minimal adenine codon |
|---|---|---|
| A | Alanine | GCU or GCC or GCG |
| G | Glycine | GGU or GGC or GGG |
| V | Valine | GUC or GUU or GUG |
| D | Aspartic acid | GAC or GAU |
| E | Glutamic acid | GAG |
| I | Isoleucine | AUC or AUU |
| T | Threonine | ACU or ACC or ACG |
| N | Asparagine | AAC or AAU |
| K | Lysine | AAG |
| S | Serine | UCU or UCC or UCG |
| R | Arginine | CGU or CGC or CGG |
| L | Leucine | CUG or CUC or CUU |
| P | Proline | CCG or CCU or CCC |
| H | Histidine | CAC or CAU |
| Q | Glutamine | CAG |
| F | Phenylalanine | UUC or UUU |
| Y | Tyrosine | UAC or UAU |
| C | Cysteine | UGC or UGU |
| W | Tryptophan | UGG |
| M | Methionine | AUG |

[0528] In some embodiments, a nucleic acid is provided that encodes an RNA-guided DNA-binding agent, e.g. a Cas9 nuclease such as an S. pyogenes Cas9, comprising an ORF consisting of a set of codons of which at least about 75%, 80%, 85%, 90%, 95%, 98%, 99%, or 100% of the codons are codons listed in Table 4. In some embodiments, the ORF has minimal nucleotide homopolymers, e.g., repetitive strings of the same nucleotides. For example, in some embodiments, when selecting a minimal uridine codon from the codons listed in Table 4, a nucleic acid is constructed by selecting the minimal adenine codons that reduce the number and length of nucleotide homopolymers, e.g., selecting GCG instead of GCC for alanine or selecting GGC instead of GGG for glycine.

[0529] In any of the foregoing embodiments, the nucleic acid may be an mRNA.

[0530] 2. Codons that Increase Translation and/or that Correspond to Highly Expressed tRNAs; Exemplary Codon Sets

[0531] In some embodiments, the nucleic acid comprises an ORF having codons that increase translation in a mammal, such as a human. In further embodiments, the nucleic acid comprises an ORF having codons that increase translation in an organ, such as the liver, of the mammal, e.g., a human. In further embodiments, the nucleic acid comprises an ORF having codons that increase translation in a cell type, such as a hepatocyte, of the mammal, e.g., a human. An increase in translation in a mammal, cell type, organ of a mammal, human, organ of a human, etc., can be determined relative to the extent of translation wild-type sequence of the ORF, or relative to an ORF having a codon distribution matching the codon distribution of the organism from which the ORF was derived or the organism that contains the most similar ORF at the amino acid level, such as S. pyogenes, S. aureus, or another prokaryote as the case may be for prokaryotically-derived Cas nucleases, such as the Cas nucleases from other prokaryotes described below. Alternatively, in some embodiments, an increase in translation for a Cas9 sequence in a mammal, cell type, organ of a mammal, human, organ of a human, etc., is determined relative to translation of an ORF with the sequence of SEQ ID NO: 205 with all else equal, including any applicable point mutations, heterologous domains, and the like. Codons useful for increasing expression in a human, including the human liver and human hepatocytes, can be codons corresponding to highly expressed tRNAs in the human liver/hepatocytes, which are discussed in Dittmar K A, PLos Genetics 2(12): e221 (2006). In some embodiments, at least about 75%, 80%, 85%, 90%, 95%, 96%, 97%, 98%, 99%, or 100% of the codons in an ORF are codons corresponding to highly expressed tRNAs (e.g., the highest-expressed tRNA for each amino acid) in a mammal, such as a human. In some embodiments, at least 75%, 80%, 85%, 90%, 95%, 96%, 97%, 98%, 99%, or 100% of the codons in an ORF are codons corresponding to highly expressed tRNAs (e.g., the highest-expressed tRNA for each amino acid) in a mammalian organ, such as a human organ. In some embodiments, at least 75%, 80%, 85%, 90%, 95%, 96%, 97%, 98%, 99%, or 100% of the codons in an ORF are codons corresponding to highly expressed tRNAs (e.g., the highest-expressed tRNA for each amino acid) in a mammalian liver, such as a human liver. In some embodiments, at least 75%, 80%, 85%, 90%, 95%, 96%, 97%, 98%, 99%, or 100% of the codons in an ORF are codons corresponding to highly expressed tRNAs (e.g., the highest-expressed tRNA for each amino acid) in a mammalian hepatocyte, such as a human hepatocyte.

[0532] Alternatively, codons corresponding to highly expressed tRNAs in an organism (e.g., human) in general may be used.

[0533] Any of the foregoing approaches to codon selection can be combined with the minimal adenine codons shown above, e.g., by starting with the codons of Table 4, and then where more than one option is available, using the codon that corresponds to a more highly-expressed tRNA, either in the organism (e.g., human) in general, or in an organ or cell type of interest, such as the liver or hepatocytes (e.g., human liver or human hepatocytes).

[0534] In some embodiments, at least 75%, 80%, 85%, 90%, 95%, 96%, 97%, 98%, 99%, or 100% of the codons in an ORF are codons from a codon set shown in Table 5 (e.g., the low U 1, low A, or low A/U codon set). The codons in the low U 1, low G, low C, low A, and low A/U sets use codons that minimize the indicated nucleotides while also using codons corresponding to highly expressed tRNAs where more than one option is available. In some embodiments, at least 75%, 80%, 85%, 90%, 95%, 96%, 97%, 98%, 99%, or 100% of the codons in an ORF are codons from the low U 1 codon set shown in Table 5. In some embodiments, at least 75%, 80%, 85%, 90%, 95%, 96%, 97%, 98%, 99%, or 100% of the codons in an ORF are codons from the low A codon set shown in Table 5. In some embodiments, at least 75%, 80%, 85%, 90%, 95%, 96%, 97%, 98%, 99%, or 100% of the codons in an ORF are codons from the low A/U codon set shown in Table 5.

TABLE 5
Exemplary Codon Sets

| Amino | Low | Low | High | Low | Low | Low | Low | Long |
|---|---|---|---|---|---|---|---|---|
| Acid | U 1 | U 2 | U | G | C | A | A/U | Half Life |
| Gly | GGC | GGG | GGT | GGC | GGA | GGC | GGC | GGT |
| Glu | GAG | GAA | GAA | GAA | GAG | GAG | GAG | GAA |
| Asp | GAC | GAC | GAT | GAC | GAT | GAC | GAC | GAC |
| Val | GTG | GTA | GTT | GTC | GTG | GTG | GTG | GTC |
| Ala | GCC | GCG | GCT | GCC | GCT | GCC | GCC | GCC |
| Arg | AGA | CGA | CGT | AGA | AGA | CGG | CGG | AGA |
| Ser | AGC | AGC | TCT | TCC | AGT | TCC | AGC | TCT |
| Lys | AAG | AAA | AAA | AAA | AAG | AAG | AAG | AAG |
| Asn | AAC | AAC | AAT | AAC | AAT | AAC | AAC | AAC |
| Met | ATG | ATG | ATG | ATG | AGT | ATG | ATG | ATG |
| Ile | ATC | ATA | ATT | ATC | ATT | ATC | ATC | ATC |
| Thr | ACC | ACG | ACT | ACC | ACA | ACC | ACC | ACC |
| Trp | TGG | TGG | TGG | TGG | TGG | TGG | TGG | TGG |
| Cys | TGC | TGC | TGT | TGC | TGT | TGC | TGC | TGC |
| Tyr | TAC | TAC | TAT | TAC | TAT | TAC | TAC | TAC |
| Leu | CTG | CTA | TTA | CTC | TTG | CTG | CTG | TTG |
| Phe | TTC | TTC | TTT | TTC | TTT | TTC | TTC | TTC |
| Gln | CAG | CAA | CAA | CAA | CAG | CAG | CAG | CAA |
| His | CAC | CAC | CAT | CAC | CAT | CAC | CAC | CAC |

[0535] 3. Exemplary Sequences

[0536] In some embodiments, the ORF encoding the RNA-guided DNA binding agent comprises a sequence with at least 93% identity to SEQ ID NO: 311; and/or the ORF has at least 93% identity to SEQ ID NO: 311 over at least its first 50, 200, 250, or 300 nucleotides, or at least 95% identity to SEQ ID NO: 311 over at least its first 30, 50, 70, 100, 150, 200, 250, or 300 nucleotides; and/or the ORF consists of a set of codons of which at least 95%, 96%, 97%, 98%, 99%, 99.5%, or 100% of the codons are codons listed in Table 1; and/or the ORF has an adenine content ranging from its minimum adenine content to 123% of the minimum adenine content; and/or the ORF has an adenine dinucleotide content ranging from its minimum adenine dinucleotide content to 150% of the minimum adenine dinucleotide content.

[0537] In some embodiments, the polynucleotide encoding the RNA-guided DNA binding agent comprises a sequence with at least 95%, 96%, 97%, 98%, 99%, 99.5%, or 100% identity to SEQ ID NO: 377.

[0538] In some embodiments, the ORF encoding the RNA-guided DNA binding agent comprises a sequence with at least 90% identity to any one of SEQ ID NOs: 201, 204, 207, 209, 210, 211, 212, 214, 215, 217, 218, 220, 221, 223, 224, 226, 227, 229, 230, 250, 252, 254, 265, 266, or 307-375. In some embodiments, the mRNA comprises an ORF encoding an RNA-guided DNA binding agent, wherein the RNA-guided DNA binding agent comprises an amino acid sequence with at least 90% identity to any one of SEQ ID NOs: 203, 206, 208, 213, 216, 219, 222, 225, 228, 268, or 386-396, wherein the ORF has an adenine content ranging from its minimum adenine content to 150% of the minimum adenine content, and/or has a adenine dinucleotide content ranging from its minimum adenine dinucleotide content to 150% of the minimum adenine dinucleotide content. In some embodiments, the encoded RNA-guided DNA binding agent comprises an amino acid sequence with at least 90% identity to any one of SEQ ID NOs: 203, 206, 208, 213, 216, 219, 222, 225, 228, 268, or 386-396, wherein the ORF has a uridine content ranging from its minimum uridine content to 150% of the minimum uridine content, and/or has a uridine dinucleotide content ranging from its minimum uridine dinucleotide content to 150% of the minimum uridine dinucleotide content. In some such embodiments, both the adenine and uridine nucleotide contents are less than or equal to 150% of their respective minima. In some embodiments, both the adenine and uridine dinucleotide contents are less than or equal to 150% of their respective minima. In some embodiments, the mRNA comprises a sequence with at least 90% identity to any one of SEQ ID NOs: 243, 244, 251, 253, 255-261, or 267, wherein the sequence comprises an ORF encoding an RNA-guided DNA binding agent. In some embodiments, the mRNA comprises a sequence with at least 90% identity to any one of SEQ ID NOs: 243, 244, 251, 253, 255-261, or 267, wherein the sequence comprises an ORF encoding an RNA-guided DNA binding agent, wherein the first three nucleotides of SEQ ID NOs: 243, 244, 251, 253, 255-261, or 267 are omitted. In some embodiments, any of the foregoing levels of identity is at least 95%, at least 98%, at least 99%, or 100%.

[0539] In some embodiments, the ORF encoding an RNA-guided DNA binding agent has at least 90% identity to any one of SEQ ID NO: 201, 204, 207, 209, 210, 211, 212, 214, 215, 217, 218, 220, 221, 223, 224, 226, 227, 229, 230, 250, 252, 254, 265, 266, or 307-375 over at least its first 30, 50, 70, 100, 150, 200, 250, or 300 nucleotides. The first 30, 50, 70, 100, 150, 200, 250, or 300 nucleotides are measured from the first nucleotide of the start codon (typically ATG), such that the A is nucleotide 1, the T is nucleotide 2, etc. In some embodiments, the open reading frame has at least 90% identity to any one of SEQ ID NO: 201, 204, 207, 209, 210, 211, 212, 214, 215, 217, 218, 220, 221, 223, 224, 226, 227, 229, 230, 250, 252, 254, 265, 266, or 307-375 over at least its first 10%, 12%, 15%, 20%, 25%, 30%, or 35% of its sequence. The length of the sequence of the ORF is the number of nucleotides from the beginning of the start codon to the end of the stop codon, and the first 10%, 12%, 15%, 20%, 25%, 30%, or 35% of its sequence corresponds to the number of nucleotides starting from the first nucleotide of the start codon that make up the indicated percentage of the length of the total sequence.

[0540] In some embodiments, the nucleic acid comprising an ORF encoding an RNA-guided DNA binding agent comprises a sequence having at least 90% identity to SEQ ID NO: 243 in which the ORF of SEQ ID NO: 243 (i.e., SEQ ID NO: 204) is substituted with the ORF of any one of SEQ ID NO: 207, 209, 210, 211, 212, 214, 215, 217, 218, 220, 221, 223, 224, 226, 227, 229, 230, 250, 252, 254, 265, 266, or 307-375.

[0541] In some embodiments, the nucleic acid comprising an ORF encoding an RNA-guided DNA binding agent comprises a sequence having at least 90% identity to SEQ ID NO: 244 in which the ORF of SEQ ID NO: 244 (i.e., SEQ ID NO: 204) is substituted with the ORF of any one of SEQ ID NO: 207, 209, 210, 211, 212, 214, 215, 217, 218, 220, 221, 223, 224, 226, 227, 229, 230, 250, 252, 254, 265, 266, or 307-375.

[0542] In some embodiments, the nucleic acid comprising an ORF encoding an RNA-guided DNA binding agent comprises a sequence having at least 90% identity to SEQ ID NO: 256 in which the ORF of SEQ ID NO: 256 (i.e., SEQ ID NO: 204) is substituted with an alternative ORF of any one of SEQ ID NO: 207, 209, 210, 211, 212, 214, 215, 217, 218, 220, 221, 223, 224, 226, 227, 229, 230, 250, 252, 254, 265, 266, or 307-375.

[0543] In some embodiments, the nucleic acid comprising an ORF encoding an RNA-guided DNA binding agent comprises a sequence having at least 90% identity to SEQ ID NO: 257 in which the ORF of SEQ ID NO: 257 (i.e., SEQ ID NO: 204) is substituted with the ORF of any one of SEQ ID NO: 207, 209, 210, 211, 212, 214, 215, 217, 218, 220, 221, 223, 224, 226, 227, 229, 230, 250, 252, 254, 265, 266, or 307-375.

[0544] In some embodiments, the nucleic acid comprising an ORF encoding an RNA-guided DNA binding agent comprises a sequence having at least 90% identity to SEQ ID NO: 258 in which the ORF of SEQ ID NO: 258 (i.e., SEQ ID NO: 204) is substituted with the ORF of any one of SEQ ID NO: 207, 209, 210, 211, 212, 214, 215, 217, 218, 220, 221, 223, 224, 226, 227, 229, 230, 250, 252, 254, 265, 266, or 307-375.

[0545] In some embodiments, the nucleic acid comprising an ORF encoding an RNA-guided DNA binding agent comprises a sequence having at least 90% identity to SEQ ID NO: 259 in which the ORF of SEQ ID NO: 259 (i.e., SEQ ID NO: 204) is substituted with the ORF of any one of SEQ ID NO: 207, 209, 210, 211, 212, 214, 215, 217, 218, 220, 221, 223, 224, 226, 227, 229, 230, 250, 252, 254, 265, 266, or 307-375.

[0546] In some embodiments, the nucleic acid comprising an ORF encoding an RNA-guided DNA binding agent comprises a sequence having at least 90% identity to SEQ ID NO: 260 in which the ORF of SEQ ID NO: 260 (i.e., SEQ ID NO: 204) is substituted with the ORF of any one of SEQ ID NO: 207, 209, 210, 211, 212, 214, 215, 217, 218, 220, 221, 223, 224, 226, 227, 229, 230, 250, 252, 254, 265, 266, or 307-375.

[0547] In some embodiments, the nucleic acid comprising an ORF encoding an RNA-guided DNA binding agent comprises a sequence having at least 90% identity to SEQ ID NO: 261 in which the ORF of SEQ ID NO: 261 (i.e., SEQ ID NO: 204) is substituted with the ORF of any one of SEQ ID NO: 207, 209, 210, 211, 212, 214, 215, 217, 218, 220, 221, 223, 224, 226, 227, 229, 230, 250, 252, 254, 265, 266, or 307-375.

[0548] In some embodiments, the nucleic acid comprising an ORF encoding an RNA-guided DNA binding agent comprises a sequence having at least 90% identity to SEQ ID NO: 376 in which the ORF of SEQ ID NO: 376 (i.e., SEQ ID NO: 204) is substituted with the ORF of any one of SEQ ID NO: 207, 209, 210, 211, 212, 214, 215, 217, 218, 220, 221, 223, 224, 226, 227, 229, 230, 250, 252, 254, 265, 266, or 307-375.

[0549] In some embodiments, the nucleic acid comprising an ORF encoding an RNA-guided DNA binding agent comprises a sequence having at least 90% identity to SEQ ID NO: 377 in which the ORF of SEQ ID NO: 377 (i.e., SEQ ID NO: 204) is substituted with the ORF of any one of SEQ ID NO: 207, 209, 210, 211, 212, 214, 215, 217, 218, 220, 221, 223, 224, 226, 227, 229, 230, 250, 252, 254, 265, 266, or 307-375.

[0550] In some embodiments, the nucleic acid comprising an ORF encoding an RNA-guided DNA binding agent comprises a sequence having at least 90% identity to SEQ ID NO: 378 in which the ORF of SEQ ID NO: 378 (i.e., SEQ ID NO: 204) is substituted with the ORF of any one of SEQ ID NO: 207, 209, 210, 211, 212, 214, 215, 217, 218, 220, 221, 223, 224, 226, 227, 229, 230, 250, 252, 254, 265, 266, or 307-375.

[0551] In some embodiments, the nucleic acid comprising an ORF encoding an RNA-guided DNA binding agent comprises a sequence having at least 90% identity to SEQ ID NO: 379 in which the ORF of SEQ ID NO: 379 (i.e., SEQ ID NO: 204) is substituted with the ORF of any one of SEQ ID NO: 207, 209, 210, 211, 212, 214, 215, 217, 218, 220, 221, 223, 224, 226, 227, 229, 230, 250, 252, 254, 265, 266, or 307-375.

[0552] In some embodiments, the nucleic acid comprising an ORF encoding an RNA-guided DNA binding agent comprises a sequence having at least 90% identity to SEQ ID NO: 380 in which the ORF of SEQ ID NO: 380 (i.e., SEQ ID NO: 204) is substituted with the ORF of any one of SEQ ID NO: 207, 209, 210, 211, 212, 214, 215, 217, 218, 220, 221, 223, 224, 226, 227, 229, 230, 250, 252, 254, 265, 266, or 307-375.

[0553] In some embodiments, the nucleic acid comprising an ORF encoding an RNA-guided DNA binding agent comprises a sequence having at least 90% identity to SEQ ID NO: 381 in which the ORF of SEQ ID NO: 381 (i.e., SEQ ID NO: 204) is substituted with the ORF of any one of SEQ ID NO: 207, 209, 210, 211, 212, 214, 215, 217, 218, 220, 221, 223, 224, 226, 227, 229, 230, 250, 252, 254, 265, 266, or 307-375.

[0554] In some embodiments, the nucleic acid comprising an ORF encoding an RNA-guided DNA binding agent comprises a sequence having at least 90% identity to SEQ ID NO: 382 in which the ORF of SEQ ID NO: 382 (i.e., SEQ ID NO: 204) is substituted with the ORF of any one of SEQ ID NO: 207, 209, 210, 211, 212, 214, 215, 217, 218, 220, 221, 223, 224, 226, 227, 229, 230, 250, 252, 254, 265, 266, or 307-375.

[0555] In some embodiments, the nucleic acid comprising an ORF encoding an RNA-guided DNA binding agent comprises a sequence having at least 90% identity to SEQ ID NO: 383 in which the ORF of SEQ ID NO: 383 (i.e., SEQ ID NO: 204) is substituted with the ORF of any one of SEQ ID NO: 207, 209, 210, 211, 212, 214, 215, 217, 218, 220, 221, 223, 224, 226, 227, 229, 230, 250, 252, 254, 265, 266, or 307-375.

[0556] In some embodiments, the nucleic acid comprising an ORF encoding an RNA-guided DNA binding agent comprises a sequence having at least 90% identity to SEQ ID NO: 384 in which the ORF of SEQ ID NO: 384 (i.e., SEQ ID NO: 204) is substituted with the ORF of any one of SEQ ID NO: 207, 209, 210, 211, 212, 214, 215, 217, 218, 220, 221, 223, 224, 226, 227, 229, 230, 250, 252, 254, 265, 266, or 307-375.

[0557] In some embodiments, the nucleic acid comprising an ORF encoding an RNA-guided DNA binding agent comprises a sequence having at least 90% identity to SEQ ID NO: 385 in which the ORF of SEQ ID NO: 385 (i.e., SEQ ID NO: 204) is substituted with the ORF of any one of SEQ ID NO: 207, 209, 210, 211, 212, 214, 215, 217, 218, 220, 221, 223, 224, 226, 227, 229, 230, 250, 252, 254, 265, 266, or 307-375.

[0558] In some embodiments, the degree of identity to the optionally substituted sequences of SEQ ID Nos: 243, 244, 256-61, or 376-385 is at least 95%. In some embodiments, the degree of identity to the optionally substituted sequences of SEQ ID NOs: 243, 244, 256-61, or 376-385 is at least 98%. In some embodiments, the degree of identity to the optionally substituted sequences of SEQ ID NOs: 243, 244, 256-61, or 376-385 is at least 99%. In some embodiments, the degree of identity to the optionally substituted sequences of SEQ ID NOs: 243, 244, 256-61, or 376-385 is 100%.

[0559] 4. Additional Features of Nucleic Acids, mRNAs, and ORFs

[0560] Any of the additional features described herein may be combined to the extent feasible with any of the embodiments described above.

[0561] a) Low Uridine Content

[0562] In some embodiments, the ORF encoding the RNA-guided DNA-binding agent, e.g. a Cas9 nuclease such as an S. pyogenes Cas9, has a uridine content ranging from its minimum uridine content to about 150% of its minimum uridine content. In some embodiments, the uridine content of the ORF is less than or equal to about 145%, 140%, 135%, 130%, 125%, 120%, 115%, 110%, 105%, 104%, 103%, 102%, or 101% of its minimum uridine content. In some embodiments, the ORF has a uridine content equal to its minimum uridine content. In some embodiments, the ORF has a uridine content less than or equal to about 150% of its minimum uridine content. In some embodiments, the ORF has a uridine content less than or equal to about 145% of its minimum uridine content. In some embodiments, the ORF has a uridine content less than or equal to about 140% of its minimum uridine content. In some embodiments, the ORF has a uridine content less than or equal to about 135% of its minimum uridine content. In some embodiments, the ORF has a uridine content less than or equal to about 130% of its minimum uridine content. In some embodiments, the ORF has a uridine content less than or equal to about 125% of its minimum uridine content. In some embodiments, the ORF has a uridine content less than or equal to about 120% of its minimum uridine content. In some embodiments, the ORF has a uridine content less than or equal to about 115% of its minimum uridine content. In some embodiments, the ORF has a uridine content less than or equal to about 110% of its minimum uridine content. In some embodiments, the ORF has a uridine content less than or equal to about 105% of its minimum uridine content. In some embodiments, the ORF has a uridine content less than or equal to about 104% of its minimum uridine content. In some embodiments, the ORF has a uridine content less than or equal to about 103% of its minimum uridine content. In some embodiments, the ORF has a uridine content less than or equal to about 102% of its minimum uridine content. In some embodiments, the ORF has a uridine content less than or equal to about 101% of its minimum uridine content.

[0563] In some embodiments, the ORF has a uridine dinucleotide content ranging from its minimum uridine dinucleotide content to 200% of its minimum uridine dinucleotide content. In some embodiments, the uridine dinucleotide content of the ORF is less than or equal to about 195%, 190%, 185%, 180%, 175%, 170%, 165%, 160%, 155%, 150%, 145%, 140%, 135%, 130%, 125%, 120%, 115%, 110%, 105%, 104%, 103%, 102%, or 101% of its minimum uridine dinucleotide content. In some embodiments, the ORF has a uridine dinucleotide content equal to its minimum uridine dinucleotide content. In some embodiments, the ORF has a uridine dinucleotide content less than or equal to about 200% of its minimum uridine dinucleotide content. In some embodiments, the ORF has a uridine dinucleotide content less than or equal to about 195% of its minimum uridine dinucleotide content. In some embodiments, the ORF has a uridine dinucleotide content less than or equal to about 190% of its minimum uridine dinucleotide content. In some embodiments, the ORF has a uridine dinucleotide content less than or equal to about 185% of its minimum uridine dinucleotide content. In some embodiments, the ORF has a uridine dinucleotide content less than or equal to about 180% of its minimum uridine dinucleotide content. In some embodiments, the ORF has a uridine dinucleotide content less than or equal to about 175% of its minimum uridine dinucleotide content. In some embodiments, the ORF has a uridine dinucleotide content less than or equal to about 170% of its minimum uridine dinucleotide content. In some embodiments, the ORF has a uridine dinucleotide content less than or equal to about 165% of its minimum uridine dinucleotide content. In some embodiments, the ORF has a uridine dinucleotide content less than or equal to about 160% of its minimum uridine dinucleotide content. In some embodiments, the ORF has a uridine dinucleotide content less than or equal to about 155% of its minimum uridine dinucleotide content. In some embodiments, the ORF has a uridine dinucleotide content equal to its minimum uridine dinucleotide content. In some embodiments, the ORF has a uridine dinucleotide content less than or equal to about 150% of its minimum uridine dinucleotide content. In some embodiments, the ORF has a uridine dinucleotide content less than or equal to about 145% of its minimum uridine dinucleotide content. In some embodiments, the ORF has a uridine dinucleotide content less than or equal to about 140% of its minimum uridine dinucleotide content. In some embodiments, the ORF has a uridine dinucleotide content less than or equal to about 135% of its minimum uridine dinucleotide content. In some embodiments, the ORF has a uridine dinucleotide content less than or equal to about 130% of its minimum uridine dinucleotide content. In some embodiments, the ORF has a uridine dinucleotide content less than or equal to about 125% of its minimum uridine dinucleotide content. In some embodiments, the ORF has a uridine dinucleotide content less than or equal to about 120% of its minimum uridine dinucleotide content. In some embodiments, the ORF has a uridine dinucleotide content less than or equal to about 115% of its minimum uridine dinucleotide content. In some embodiments, the ORF has a uridine dinucleotide content less than or equal to about 110% of its minimum uridine dinucleotide content. In some embodiments, the ORF has a uridine dinucleotide content less than or equal to about 105% of its minimum uridine dinucleotide content. In some embodiments, the ORF has a uridine dinucleotide content less than or equal to about 104% of its minimum uridine dinucleotide content. In some embodiments, the ORF has a uridine dinucleotide content less than or equal to about 103% of its minimum uridine dinucleotide content. In some embodiments, the ORF has a uridine dinucleotide content less than or equal to about 102% of its minimum uridine dinucleotide content. In some embodiments, the ORF has a uridine dinucleotide content less than or equal to about 101% of its minimum uridine dinucleotide content.

[0564] In some embodiments, the ORF has a uridine dinucleotide content ranging from its minimum uridine dinucleotide content to the uridine dinucleotide content that is 90% or lower of the maximum uridine dinucleotide content of a reference sequence that encodes the same protein as the mRNA in question. In some embodiments, the uridine dinucleotide content of the ORF is less than or equal to about 85%, 80%, 75%, 70%, 65%, 60%, 55%, 50%, 45%, 40%, 35%, 30%, 25%, 20%, 15%, 10%, or 5% of the maximum uridine dinucleotide content of a reference sequence that encodes the same protein as the mRNA in question.

[0565] In some embodiments, the ORF has a uridine trinucleotide content ranging from 0 uridine trinucleotides to 1, 2, 3, 4, 5, 6, 7, 8, 9, 10, 20, 30, 40, or 50 uridine trinucleotides (where a longer run of uridines counts as the number of unique three-uridine segments within it, e.g., a uridine tetranucleotide contains two uridine trinucleotides, a uridine pentanucleotide contains three uridine trinucleotides, etc.). In some embodiments, the ORF has a uridine trinucleotide content ranging from 0% uridine trinucleotides to 0.1%, 0.2%, 0.3%, 0.4%, 0.5%, 0.6%, 0.7%, 0.8%, 0.9%, 1%, 1.5%, or 2% uridine trinucleotides, where the percentage content of uridine trinucleotides is calculated as the percentage of positions in a sequence that are occupied by uridines that form part of a uridine trinucleotide (or longer run of uridines), such that the sequences UUUAAA and UUUUAAAA would each have a uridine trinucleotide content of 50%. For example, in some embodiments, the ORF has a uridine trinucleotide content less than or equal to 2%. For example, in some embodiments, the ORF has a uridine trinucleotide content less than or equal to 1.5%. In some embodiments, the ORF has a uridine trinucleotide content less than or equal to 1%. In some embodiments, the ORF has a uridine trinucleotide content less than or equal to 0.9%. In some embodiments, the ORF has a uridine trinucleotide content less than or equal to 0.8%. In some embodiments, the ORF has a uridine trinucleotide content less than or equal to 0.7%. In some embodiments, the ORF has a uridine trinucleotide content less than or equal to 0.6%. In some embodiments, the ORF has a uridine trinucleotide content less than or equal to 0.5%. In some embodiments, the ORF has a uridine trinucleotide content less than or equal to 0.4%. In some embodiments, the ORF has a uridine trinucleotide content less than or equal to 0.3%. In some embodiments, the ORF has a uridine trinucleotide content less than or equal to 0.2%. In some embodiments, the ORF has a uridine trinucleotide content less than or equal to 0.1%. In some embodiments, the ORF has no uridine trinucleotides.

[0566] In some embodiments, the ORF has a uridine trinucleotide content ranging from its minimum uridine trinucleotide content to the uridine trinucleotide content that is 90% or lower of the maximum uridine trinucleotide content of a reference sequence that encodes the same protein as the mRNA in question. In some embodiments, the uridine trinucleotide content of the ORF is less than or equal to about 85%, 80%, 75%, 70%, 65%, 60%, 55%, 50%, 45%, 40%, 35%, 30%, 25%, 20%, 15%, 10%, or 5% of the maximum uridine trinucleotide content of a reference sequence that encodes the same protein as the mRNA in question.

[0567] A given ORF can be reduced in uridine content or uridine dinucleotide content or uridine trinucleotide content, for example, by using minimal uridine codons in a sufficient fraction of the ORF. For example, an amino acid sequence for an RNA-guided DNA-binding agent can be back-translated into an ORF sequence by converting amino acids to codons, wherein some or all of the ORF uses the exemplary minimal uridine codons shown below. In some embodiments, at least about 50%, 55%, 60%, 65%, 70%, 75%, 80%, 85%, 90%, 95%, 98%, 99%, or 100% of the codons in the ORF are codons listed in Table 6.

TABLE 6
Exemplary minimal uridine codons

| | Amino Acid | Minimal uridine codon |
|---|---|---|
| A | Alanine | GCA or GCC or GCG |
| G | Glycine | GGA or GGC or GGG |
| V | Valine | GUC or GUA or GUG |
| D | Aspartic acid | GAC |
| E | Glutamic acid | GAA or GAG |
| I | Isoleucine | AUC or AUA |
| T | Threonine | ACA or ACC or ACG |
| N | Asparagine | AAC |
| K | Lysine | AAG or AAA |
| S | Serine | AGC |
| R | Arginine | AGA or AGG |
| L | Leucine | CUG or CUA or CUC |
| P | Proline | CCG or CCA or CCC |
| H | Histidine | CAC |
| Q | Glutamine | CAG or CAA |
| F | Phenylalanine | UUC |
| Y | Tyrosine | UAC |
| C | Cysteine | UGC |
| W | Tryptophan | UGG |
| M | Methionine | AUG |

[0568] In some embodiments, the ORF consists of a set of codons of which at least about 75%, 80%, 85%, 90%, 95%, 98%, 99%, or 100% of the codons are codons listed in Table 6.

[0569] b) Low Adenine and Uridine Content

[0570] To the extent feasible, any of the features described herein with respect to low adenine content can be combined with any of the features described herein with respect to low uridine content. For example, a nucleic acid (e.g., mRNA) may be provided that encodes an RNA-guided DNA-binding agent comprising an ORF having a uridine content ranging from its minimum uridine content to about 150% of its minimum uridine content (e.g., a uridine content of the ORF is less than or equal to about 145%, 140%, 135%, 130%, 125%, 120%, 115%, 110%, 105%, 104%, 103%, 102%, or 101% of its minimum uridine content) and an adenine content ranging from its minimum adenine content to about 150% of its minimum adenine content (e.g., less than or equal to about 145%, 140%, 135%, 130%, 125%, 120%, 115%, 110%, 105%, 104%, 103%, 102%, or 101% of its minimum adenine content). So too for uridine and adenine dinucleotides. Similarly, the content of uridine nucleotides and adenine dinucleotides in the ORF may be as set forth above. Similarly, the content of uridine dinucleotides and adenine nucleotides in the ORF may be as set forth above.

[0571] A given ORF can be reduced in uridine and adenine nucleotide and/or dinucleotide content, for example, by using minimal uridine and adenine codons in a sufficient fraction of the ORF. For example, an amino acid sequence for an RNA-guided DNA-binding agent can be back-translated into an ORF sequence by converting amino acids to codons, wherein some or all of the ORF uses the exemplary minimal uridine and adenine codons shown below. In some embodiments, at least about 50%, 55%, 60%, 65%, 70%, 75%, 80%, 85%, 90%, 95%, 98%, 99%, or 100% of the codons in the ORF are codons listed in Table 7.

TABLE 7
Exemplary minimal uridine and adenine codons

| | Amino Acid | Minimal uridine codon |
|---|---|---|
| A | Alanine | GCC or GCG |
| G | Glycine | GGC or GGG |
| V | Valine | GUC or GUG |
| D | Aspartic acid | GAC |
| E | Glutamic acid | GAG |
| I | Isoleucine | AUC |
| T | Threonine | ACC or ACG |
| N | Asparagine | AAC |
| K | Lysine | AAG |
| S | Serine | AGC or UCC or UCG |
| R | Arginine | CGC or CGG |
| L | Leucine | CUG or CUC |
| P | Proline | CCG or CCC |
| H | Histidine | CAC |
| Q | Glutamine | CAG |
| F | Phenylalanine | UUC |
| Y | Tyrosine | UAC |
| C | Cysteine | UGC |
| W | Tryptophan | UGG |
| M | Methionine | AUG |

[0572] In some embodiments, the ORF consists of a set of codons of which at least about 75%, 80%, 85%, 90%, 95%, 98%, 99%, or 100% of the codons are codons listed in Table 7. As can be seen in Table 7, each of the three listed serine codons contains either one A or one U. In some embodiments, uridine minimization is prioritized by using AGC codons for serine. In some embodiments, adenine minimization is prioritized by using UCC and/or UCG codons for serine.

[0573] c) UTRs; Kozak Sequences

[0574] In some embodiments, the polynucleotide (e.g., mRNA) comprises a 5′ UTR, a 3′ UTR, or 5′ and 3′ UTRs. In some embodiments, the polynucleotide (e.g., mRNA) comprises at least one UTR from Hydroxysteroid 17-Beta Dehydrogenase 4 (HSD17B4 or HSD), e.g., a 5′ UTR from HSD. In some embodiments, the polynucleotide (e.g., mRNA) comprises at least one UTR from a globin polynucleotide (e.g., mRNA), for example, human alpha globin (HBA) polynucleotide (e.g., mRNA), human beta globin (HBB) polynucleotide (e.g., mRNA), or Xenopus laevis beta globin (XBG) polynucleotide (e.g., mRNA). In some embodiments, the polynucleotide (e.g., mRNA) comprises a 5′ UTR, 3′ UTR, or 5′ and 3′ UTRs from a globin polynucleotide (e.g., mRNA), such as HBA, HBB, or XBG. In some embodiments, the polynucleotide (e.g., mRNA) comprises a 5′ UTR from bovine growth hormone, cytomegalovirus (CMV), mouse Hba-a1, HSD, an albumin gene, HBA, HBB, or XBG. In some embodiments, the polynucleotide (e.g., mRNA) comprises a 3′ UTR from bovine growth hormone, cytomegalovirus, mouse Hba-a1, HSD, an albumin gene, HBA, HBB, or XBG. In some embodiments, the polynucleotide (e.g., mRNA) comprises 5′ and 3′ UTRs from bovine growth hormone, cytomegalovirus, mouse Hba-a1, HSD, an albumin gene, HBA, HBB, XBG, heat shock protein 90 (Hsp90), glyceraldehyde 3-phosphate dehydrogenase (GAPDH), beta-actin, alpha-tubulin, tumor protein (p53), or epidermal growth factor receptor (EGFR).

[0575] In some embodiments, the polynucleotide (e.g., mRNA) comprises 5′ and 3′ UTRs that are from the same source, e.g., a constitutively expressed polynucleotide (e.g., mRNA) such as actin, albumin, or a globin such as HBA, HBB, or XBG.

[0576] In some embodiments, a nucleic acid disclosed herein comprises a 5′ UTR with at least 90% identity to any one of SEQ ID NOs: 232, 234, 236, 238, 241, or 275-277. In some embodiments, a nucleic acid disclosed herein comprises a 3′ UTR with at least 90% identity to any one of SEQ ID NOs: 233, 235, 237, 239, or 240. In some embodiments, any of the foregoing levels of identity is at least 95%, at least 98%, at least 99%, or 100%. In some embodiments, a nucleic acid disclosed herein comprises a 5′ UTR having the sequence of any one of SEQ ID NOs: 232, 234, 236, 238, or 241. In some embodiments, a nucleic acid disclosed herein comprises a 3′ UTR having the sequence of any one of SEQ ID NOs: 233, 235, 237, 239, or 240.

[0577] In some embodiments, the polynucleotide (e.g., mRNA) does not comprise a 5′ UTR, e.g., there are no additional nucleotides between the 5′ cap and the start codon. In some embodiments, the polynucleotide (e.g., mRNA) comprises a Kozak sequence (described below) between the 5′ cap and the start codon, but does not have any additional 5′ UTR. In some embodiments, the polynucleotide (e.g., mRNA) does not comprise a 3′ UTR, e.g., there are no additional nucleotides between the stop codon and the poly-A tail.

[0578] In some embodiments, the polynucleotide (e.g., mRNA) comprises a Kozak sequence. The Kozak sequence can affect translation initiation and the overall yield of a polypeptide translated from a nucleic acid. A Kozak sequence includes a methionine codon that can function as the start codon. A minimal Kozak sequence is NNNRUGN wherein at least one of the following is true: the first N is A or G and the second N is G. In the context of a nucleotide sequence, R means a purine (A or G). In some embodiments, the Kozak sequence is RNNRUGN, NNNRUGG, RNNRUGG, RNNAUGN, NNNAUGG, or RNNAUGG. In some embodiments, the Kozak sequence is rccRUGg with zero mismatches or with up to one or two mismatches to positions in lowercase. In some embodiments, the Kozak sequence is rccAUGg with zero mismatches or with up to one or two mismatches to positions in lowercase. In some embodiments, the Kozak sequence is gccRccAUGG (nucleotides 4-13 of SEQ ID NO: 305) with zero mismatches or with up to one, two, or three mismatches to positions in lowercase. In some embodiments, the Kozak sequence is gccAccAUG with zero mismatches or with up to one, two, three, or four mismatches to positions in lowercase. In some embodiments, the Kozak sequence is GCCACCAUG. In some embodiments, the Kozak sequence is gccgccRccAUGG (SEQ ID NO: 305) with zero mismatches or with up to one, two, three, or four mismatches to positions in lowercase.

[0579] d) Poly-A Tail

[0580] In some embodiments, the polynucleotide (e.g., mRNA) further comprises a polyadenylated (poly-A) tail. In some instances, the poly-A tail is “interrupted” with one or more non-adenine nucleotide “anchors” at one or more locations within the poly-A tail. The poly-A tails may comprise at least 8 consecutive adenine nucleotides, but also comprise one or more non-adenine nucleotide. As used herein, “non-adenine nucleotides” refer to any natural or non-natural nucleotides that do not comprise adenine. Guanine, thymine, and cytosine nucleotides are exemplary non-adenine nucleotides. Thus, the poly-A tails on the polynucleotide (e.g., mRNA) described herein may comprise consecutive adenine nucleotides located 3′ to nucleotides encoding an RNA-guided DNA-binding agent or a sequence of interest. In some instances, the poly-A tails on polynucleotide (e.g., mRNA) comprise non-consecutive adenine nucleotides located 3′ to nucleotides encoding an RNA-guided DNA-binding agent or a sequence of interest, wherein non-adenine nucleotides interrupt the adenine nucleotides at regular or irregularly spaced intervals.

[0581] In some embodiments, the poly-A tail is encoded in the plasmid used for in vitro transcription of mRNA and becomes part of the transcript. The poly-A sequence encoded in the plasmid, i.e., the number of consecutive adenine nucleotides in the poly-A sequence, may not be exact, e.g., a 100 poly-A sequence in the plasmid may not result in a precisely 100 poly-A sequence in the transcribed mRNA. In some embodiments, the poly-A tail is not encoded in the plasmid, and is added by PCR tailing or enzymatic tailing, e.g., using E. coli poly(A) polymerase.

[0582] In some embodiments, the one or more non-adenine nucleotides are positioned to interrupt the consecutive adenine nucleotides so that a poly(A) binding protein can bind to a stretch of consecutive adenine nucleotides. In some embodiments, one or more non-adenine nucleotide(s) is located after at least 8, 9, 10, 11, or 12 consecutive adenine nucleotides. In some embodiments, the one or more non-adenine nucleotide is located after at least 8-50 consecutive adenine nucleotides. In some embodiments, the one or more non-adenine nucleotide is located after at least 8-100 consecutive adenine nucleotides. In some embodiments, the non-adenine nucleotide is after one, two, three, four, five, six, or seven adenine nucleotides and is followed by at least 8 consecutive adenine nucleotides.

[0583] The poly-A tail of the present disclosure may comprise one sequence of consecutive adenine nucleotides followed by one or more non-adenine nucleotides, optionally followed by additional adenine nucleotides.

[0584] In some embodiments, the poly-A tail comprises or contains one non-adenine nucleotide or one consecutive stretch of 2-10 non-adenine nucleotides. In some embodiments, the non-adenine nucleotide(s) is located after at least 8, 9, 10, 11, or 12 consecutive adenine nucleotides. In some instances, the one or more non-adenine nucleotides are located after at least 8-50 consecutive adenine nucleotides. In some embodiments, the one or more non-adenine nucleotides are located after at least 8, 9, 10, 11, 12, 13, 14, 15, 16, 17, 18, 19, 20, 21, 22, 23, 24, 25, 26, 27, 28, 29, 30, 31, 32, 33, 34, 35, 36, 37, 38, 39, 40, 41, 42, 43, 44, 45, 46, 47, 48, 49, or 50 consecutive adenine nucleotides.

[0585] In some embodiments, the non-adenine nucleotide is guanine, cytosine, or thymine. In some instances, the non-adenine nucleotide is a guanine nucleotide. In some embodiments, the non-adenine nucleotide is a cytosine nucleotide. In some embodiments, the non-adenine nucleotide is a thymine nucleotide. In some instances, where more than one non-adenine nucleotide is present, the non-adenine nucleotide may be selected from: a) guanine and thymine nucleotides; b) guanine and cytosine nucleotides; c) thymine and cytosine nucleotides; or d) guanine, thymine and cytosine nucleotides. An exemplary poly-A tail comprising non-adenine nucleotides is provided as SEQ ID NO: 262.

[0586] e) Modified Nucleotides

[0587] In some embodiments, the nucleic acid comprising an ORF encoding an RNA-guided DNA-binding agent comprises a modified uridine at some or all uridine positions. In some embodiments, the modified uridine is a uridine modified at the 5 position, e.g., with a halogen or C1-C3 alkoxy. In some embodiments, the modified uridine is a pseudouridine modified at the 1 position, e.g., with a C1-C3 alkyl. The modified uridine can be, for example, pseudouridine, N1-methyl-pseudouridine, 5-methoxyuridine, 5-iodouridine, or a combination thereof. In some embodiments the modified uridine is 5-methoxyuridine. In some embodiments the modified uridine is 5-iodouridine. In some embodiments the modified uridine is pseudouridine. In some embodiments the modified uridine is N1-methyl-pseudouridine. In some embodiments, the modified uridine is a combination of pseudouridine and N1-methyl-pseudouridine. In some embodiments, the modified uridine is a combination of pseudouridine and 5-methoxyuridine. In some embodiments, the modified uridine is a combination of N1-methyl pseudouridine and 5-methoxyuridine. In some embodiments, the modified uridine is a combination of 5-iodouridine and N1-methyl-pseudouridine. In some embodiments, the modified uridine is a combination of pseudouridine and 5-iodouridine. In some embodiments, the modified uridine is a combination of 5-iodouridine and 5-methoxyuridine.

[0588] In some embodiments, at least 10%, 15%, 20%, 25%, 30%, 35%, 40%, 45%, 50%, 55%, 60%, 65%, 70%, 75%, 80%, 85%, 90%, 95%, 98%, 99%, or 100% of the uridine positions in the nucleic acid are modified uridines. In some embodiments, 10%-25%, 15-25%, 25-35%, 35-45%, 45-55%, 55-65%, 65-75%, 75-85%, 85-95%, or 90-100% of the uridine positions in the nucleic acid are modified uridines, e.g., 5-methoxyuridine, 5-iodouridine, N1-methyl pseudouridine, pseudouridine, or a combination thereof. In some embodiments, 10%-25%, 15-25%, 25-35%, 35-45%, 45-55%, 55-65%, 65-75%, 75-85%, 85-95%, or 90-100% of the uridine positions in the nucleic acid are 5-methoxyuridine. In some embodiments, 10%-25%, 15-25%, 25-35%, 35-45%, 45-55%, 55-65%, 65-75%, 75-85%, 85-95%, or 90-100% of the uridine positions in the nucleic acid are pseudouridine. In some embodiments, 10%-25%, 15-25%, 25-35%, 35-45%, 45-55%, 55-65%, 65-75%, 75-85%, 85-95%, or 90-100% of the uridine positions in the nucleic acid are N1-methyl pseudouridine. In some embodiments, 10%-25%, 15-25%, 25-35%, 35-45%, 45-55%, 55-65%, 65-75%, 75-85%, 85-95%, or 90-100% of the uridine positions in the nucleic acid are 5-iodouridine. In some embodiments, 10%-25%, 15-25%, 25-35%, 35-45%, 45-55%, 55-65%, 65-75%, 75-85%, 85-95%, or 90-100% of the uridine positions in the nucleic acid are 5-methoxyuridine, and the remainder are N1-methyl pseudouridine. In some embodiments, 10%-25%, 15-25%, 25-35%, 35-45%, 45-55%, 55-65%, 65-75%, 75-85%, 85-95%, or 90-100% of the uridine positions in the nucleic acid are 5-iodouridine, and the remainder are N1-methyl pseudouridine.

[0589] f) 5′ Cap

[0590] In some embodiments, the nucleic acid (e.g., mRNA) comprising an ORF encoding an RNA-guided DNA-binding agent comprises a 5′ cap, such as a Cap0, Cap1, or Cap2. A 5′ cap is generally a 7-methylguanine ribonucleotide (which may be further modified, as discussed below e.g. with respect to ARCA) linked through a 5′-triphosphate to the 5′ position of the first nucleotide of the 5′-to-3′ chain of the nucleic acid, i.e., the first cap-proximal nucleotide. In Cap0, the riboses of the first and second cap-proximal nucleotides of the mRNA both comprise a 2′-hydroxyl. In Cap1, the riboses of the first and second transcribed nucleotides of the mRNA comprise a 2′-methoxy and a 2′-hydroxyl, respectively. In Cap2, the riboses of the first and second cap-proximal nucleotides of the mRNA both comprise a 2′-methoxy. See, e.g., Katibah et al. (2014) Proc Natl Acad Sci USA 111(33):12025-30; Abbas et al. (2017) Proc Natl Acad Sci USA 114(11):E2106-E2115. Most endogenous higher eukaryotic mRNAs, including mammalian nucleic acids such as human nucleic acids, comprise Cap1 or Cap2. Cap0 and other cap structures differing from Cap1 and Cap2 may be immunogenic in mammals, such as humans, due to recognition as “non-self” by components of the innate immune system such as IFIT-1 and IFIT-5, which can result in elevated cytokine levels including type I interferon. Components of the innate immune system such as IFIT-1 and IFIT-5 may also compete with eIF4E for binding of a nucleic acid with a cap other than Cap1 or Cap2, potentially inhibiting translation of the mRNA.

[0591] A cap can be included in an RNA co-transcriptionally. For example, ARCA (anti-reverse cap analog; Thermo Fisher Scientific Cat. No. AM8045) is a cap analog comprising a 7-methylguanine 3′-methoxy-5′-triphosphate linked to the 5′ position of a guanine ribonucleotide which can be incorporated in vitro into a transcript at initiation. ARCA results in a Cap0 cap in which the 2′ position of the first cap-proximal nucleotide is hydroxyl. See, e.g., Stepinski et al., (2001) “Synthesis and properties of mRNAs containing the novel ‘anti-reverse’cap analogs 7-methyl(3′-O-methyl)GpppG and 7-methyl(3′deoxy)GpppG,” RNA 7: 1486-1495. The ARCA structure is shown below.

[chemical structure]

[0592] CleanCap™ AG (m7G(5′)ppp(5′)(2′OMeA)pG; TriLink Biotechnologies Cat. No. N-7113) or CleanCap™ GG (m7G(5′)ppp(5′)(2′OMeG)pG; TriLink Biotechnologies Cat. No. N-7133) can be used to provide a Cap1 structure co-transcriptionally. 3′-O-methylated versions of CleanCap AG™ and CleanCap™ GG are also available from TriLink Biotechnologies as Cat. Nos. N-7413 and N-7433, respectively. The CleanCap™ AG structure is shown below. CleanCap™ structures are sometimes referred to herein using the last three digits of the catalog numbers listed above (e.g., “CleanCap™ 113” for TriLink Biotechnologies Cat. No. N-7113).

[chemical structure]

[0593] Alternatively, a cap can be added to an RNA post-transcriptionally. For example, Vaccinia capping enzyme is commercially available (New England Biolabs Cat. No. M2080S) and has RNA triphosphatase and guanylyltransferase activities, provided by its D1 subunit, and guanine methyltransferase, provided by its D12 subunit. As such, it can add a 7-methylguanine to an RNA, so as to give Cap0, in the presence of S-adenosyl methionine and GTP. See, e.g., Guo, P. and Moss, B. (1990) Proc. Natl. Acad. Sci. USA 87, 4023-4027; Mao, X. and Shuman, S. (1994) J. Biol. Chem. 269, 24472-24479. For additional discussion of caps and capping approaches, see, e.g., WO2017/053297 and Ishikawa et al., Nucl. Acids. Symp. Ser. (2009) No. 53, 129-A130.

[0594] F. Determination of Efficacy of RNAs

[0595] In some embodiments, the efficacy of a gRNA is determined when delivered together with other components, e.g., a nucleic acid encoding an RNA-guided DNA binding agent such as any of those described herein. In some embodiments, the efficacy of a combination of a corticosteroid and a gRNA, and optionally an RNA-guided DNA binding agent or nucleic acid encoding such an agent is determined.

[0596] As described herein, use of an RNA-guided DNA binding agent and a guide RNA disclosed herein can lead to double-stranded breaks in the DNA which can produce errors in the form of insertion/deletion (indel) mutations upon repair by cellular machinery. Many mutations due to indels alter the reading frame or introduce premature stop codons and, therefore, produce a non-functional protein.

[0597] In some embodiments, the efficacy of particular gRNAs, compositions, or treatments comprising administering a gRNA, corticosteroid, and optionally an RNA-guided DNA binding agent or nucleic acid encoding such an agent is determined based on in vitro models. In some embodiments, the in vitro model is HEK293 cells. In some embodiments, the in vitro model is HUH7 human hepatocarcinoma cells. In some embodiments, the in vitro model is HepG2 cells. In some embodiments, the in vitro model is primary human hepatocytes. In some embodiments, the in vitro model is primary cynomolgus hepatocytes. With respect to using primary human hepatocytes, commercially available primary human hepatocytes can be used to provide greater consistency between experiments. In some embodiments, the number of off-target sites at which a deletion or insertion occurs in an in vitro model (e.g., in primary human hepatocytes) is determined, e.g., by analyzing genomic DNA from primary human hepatocytes transfected in vitro with Cas9 mRNA and the guide RNA. In some embodiments, such a determination comprises analyzing genomic DNA from primary human hepatocytes transfected in vitro with Cas9 mRNA, the guide RNA, and a donor oligonucleotide. Exemplary procedures for such determinations are provided in the working examples below.

[0598] In some embodiments, the efficacy of particular gRNAs, compositions, or treatments comprising administering a gRNA, corticosteroid, and optionally an RNA-guided DNA binding agent or nucleic acid encoding such an agent is determined across multiple in vitro cell models for a gRNA selection process. In some embodiments, a cell line comparison of data with selected gRNAs is performed. In some embodiments, cross screening in multiple cell models is performed.

[0599] In some embodiments, the efficacy of particular gRNAs, compositions, or treatments comprising administering a gRNA, corticosteroid, and optionally an RNA-guided DNA binding agent or nucleic acid encoding such an agent is determined based on in vivo models. In some embodiments, the in vivo model is a rodent model. In some embodiments, the rodent model is a mouse which expresses a human TTR gene, which may be a mutant human TTR gene. In some embodiments, the in vivo model is a non-human primate, for example cynomolgus monkey.

[0600] In some embodiments, the efficacy of a guide RNA, compositions, or treatments comprising administering a gRNA, corticosteroid, and optionally an RNA-guided DNA binding agent or nucleic acid encoding such an agent is measured by percent editing of TTR. In some embodiments, the percent editing of TTR is compared to the percent editing necessary to achieve knockdown of TTR protein, e.g., in the cell culture media in the case of an in vitro model or in serum or tissue in the case of an in vivo model.

[0601] In some embodiments, the efficacy of a gRNA, compositions, or treatments comprising administering a gRNA, corticosteroid, and optionally an RNA-guided DNA binding agent or nucleic acid encoding such an agent is measured by the number and/or frequency of indels at off-target sequences within the genome of the target cell type. In some embodiments, efficacious guide RNAs are provided which produce indels at off target sites at very low frequencies (e.g., <5%) in a cell population and/or relative to the frequency of indel creation at the target site. Thus, the disclosure provides for guide RNAs which do not exhibit off-target indel formation in the target cell type (e.g., a hepatocyte), or which produce a frequency of off-target indel formation of <5% in a cell population and/or relative to the frequency of indel creation at the target site. In some embodiments, the disclosure provides guide RNAs which do not exhibit any off target indel formation in the target cell type (e.g., hepatocyte). In some embodiments, guide RNAs are provided which produce indels at less than 5 off-target sites, e.g., as evaluated by one or more methods described herein. In some embodiments, guide RNAs are provided which produce indels at less than or equal to 4, 3, 2, or 1 off-target site(s) e.g., as evaluated by one or more methods described herein. In some embodiments, the off-target site(s) does not occur in a protein coding region in the target cell (e.g., hepatocyte) genome.

[0602] In some embodiments, detecting gene editing events, such as the formation of insertion/deletion (“indel”) mutations and homology directed repair (HDR) events in target DNA utilize linear amplification with a tagged primer and isolating the tagged amplification products (herein after referred to as “LAM-PCR,” or “Linear Amplification (LA)” method), as described in WO2018/067447 or Schmidt et al., Nature Methods 4:1051-1057 (2007).

[0603] In some embodiments, the method comprises isolating cellular DNA from a cell that has been induced to have a double strand break (DSB) and optionally that has been provided with an HDR template to repair the DSB; performing at least one cycle of linear amplification of the DNA with a tagged primer; isolating the linear amplification products that comprise tag, thereby discarding any amplification product that was amplified with a non-tagged primer; optionally further amplifying the isolated products; and analyzing the linear amplification products, or the further amplified products, to determine the presence or absence of an editing event such as, for example, a double strand break, an insertion, deletion, or HDR template sequence in the target DNA. In some instances, the editing event can be quantified. Quantification and the like as used herein (including in the context of HDR and non-HDR editing events such as indels) includes detecting the frequency and/or type(s) of editing events in a population.

[0604] In some embodiments, only one cycle of linear amplification is conducted.

[0605] In some instances, the tagged primer comprises a molecular barcode. In some embodiments, the tagged primer comprises a molecular barcode, and only one cycle of linear amplification is conducted.

[0606] In some embodiments, detecting gene editing events, such as the formation of insertion/deletion (“indel”) mutations and homology directed repair (HDR) events in target DNA, further comprises sequencing the linear amplified products or the further amplified products. Sequencing may comprise any method known to those of skill in the art, including, next generation sequencing, and cloning the linear amplification products or further amplified products into a plasmid and sequencing the plasmid or a portion of the plasmid. Exemplary next generation sequencing methods are discussed, e.g., in Shendure et al., Nature 26:1135-1145 (2008). In other aspects, detecting gene editing events, such as the formation of insertion/deletion (“indel”) mutations and homology directed repair (HDR) events in target DNA, further comprises performing digital PCR (dPCR) or droplet digital PCR (ddPCR) on the linear amplified products or the further amplified products or contacting the linear amplified products or the further amplified products with a nucleic acid probe designed to identify DNA comprising HDR template sequence and detecting the probes that have bound to the linear amplified product(s) or further amplified product(s). In some embodiments, the method further comprises determining the location of the HDR template in the target DNA.

[0607] In certain embodiments, the method further comprises determining the sequence of an insertion site in the target DNA, wherein the insertion site is the location where the HDR template incorporates into the target DNA, and wherein the insertion site may include some target DNA sequence and some HDR template sequence.

[0608] In some embodiments, the efficacy of a guide RNA or combination is measured by secretion of TTR. In some embodiments, secretion of TTR is measured using an enzyme-linked immunosorbent assay (ELISA) assay with cell culture media or serum. In some embodiments, secretion of TTR is measured in the same in vitro or in vivo systems or models used to measure editing. In some embodiments, secretion of TTR is measured in primary human hepatocytes. In some embodiments, secretion of TTR is measured in HUH7 cells. In some embodiments, secretion of TTR is measured in HepG2 cells.

[0609] ELISA assays are generally known to the skilled artisan and can be designed to determine serum TTR levels. In one exemplary embodiment, blood is collected and the serum is isolated. The total TTR serum levels may be determined using a Mouse Prealbumin (Transthyretin) ELISA Kit (Aviva Systems Biology, Cat. OKIA00111) or similar kit for measuring human TTR. If no kit is available, an ELISA can be developed using plates that are pre-coated with capture antibody specific for the TTR one is measuring. The plate is next incubated at room temperature for a period of time before washing. Enzyme-anti-TTR antibody conjugate is added and incubated. Unbound antibody conjugate is removed and the plate washed before the addition of the chromogenic substrate solution that reacts with the enzyme. The plate is read on an appropriate plate reader at an absorbance specific for the enzyme and substrate used.

[0610] In some embodiments, the amount of TTR in cells (including those from tissue) measures efficacy of a gRNA or combination. In some embodiments, the amount of TTR in cells is measured using western blot. In some embodiments, the cell used is HUH17 cells. In some embodiments, the cell used is a primary human hepatocyte. In some embodiments, the cell used is a primar cell obtained from an animal. In some embodiments, the amount of TTR is compared to the amount of glyceraldehyde 3-phosphate dehydrogenase GAPDH (a housekeeping gene) to control for changes in cell number.

### III. LNP Formulations and Treatment of ATTR

[0611] In some embodiments, a method of treating ATTR is provided comprising administering a corticosteroid and a composition comprising a guide RNA as described herein, e.g., comprising any one or more of the guide sequences of SEQ ID NOs: 5-82, or any one or more of the sgRNAs of SEQ ID Nos: 87-124. In some embodiments, gRNAs comprising any one or more of the guide sequences of SEQ ID NOs: 5-82, or any one or more of the sgRNAs of SEQ ID Nos: 87-124 are administered to treat ATTR. The guide RNA may be administered together with an RNA-guided DNA nuclease such as a Cas nuclease (e.g., Cas9) or a nucleic acid or vector described herein encoding an RNA-guided DNA nuclease. In some embodiments, the RNA-guided DNA nuclease is a Cas cleavase. In some embodiments, the RNA-guided DNA nuclease is a Cas from a Type-II CRISPR/Cas system. In some embodiments, the RNA-guided DNA nuclease is a Cas9. In some embodiments, the RNA-guided DNA nuclease is an S. pyogenes Cas9 nuclease. In particular embodiments, the guide RNA is chemically modified. In some embodiments, the guide RNA and the nucleic acid encoding an RNA-guided DNA nuclease are administered in an LNP described herein, such as an LNP comprising a CCD lipid (e.g., an amine lipid, such as lipid A), a helper lipid (e.g., cholesterol), a stealth lipid (e.g., a PEG lipid, such as PEG2k-DMG), and optionally a neutral lipid (e.g., DSPC).

[0612] In some embodiments, a method of treating ATTR is provided comprising administering a corticosteroid and a composition comprising a guide RNA as described herein, e.g., comprising any one or more of the guide sequences of SEQ ID NOs: 5-72, 74-78, and 80-82, or any one or more of the sgRNAs of SEQ ID Nos: 87-113, 115-120, and 122-124. In some embodiments, gRNAs comprising any one or more of the guide sequences of SEQ ID NOs: 5-72, 74-78, and 80-82, or any one or more of the sgRNAs of SEQ ID Nos: 87-113, 115-120, and 122-124 are administered to treat ATTR. The guide RNA is optionally administered together with an RNA-guided DNA nuclease such as a Cas nuclease (e.g., Cas9) or a nucleic acid or vector described herein encoding an RNA-guided DNA nuclease. In some embodiments, the RNA-guided DNA nuclease is a Cas cleavase. In some embodiments, the RNA-guided DNA nuclease is a Cas from a Type-II CRISPR/Cas system. In some embodiments, the RNA-guided DNA nuclease is a Cas9. In some embodiments, the RNA-guided DNA nuclease is an S. pyogenes Cas9 nuclease. In particular embodiments, the guide RNA is chemically modified. In some embodiments, the guide RNA and the nucleic acid encoding an RNA-guided DNA nuclease are administered in an LNP described herein, such as an LNP comprising a CCD lipid (e.g., an amine lipid, such as lipid A), a helper lipid (e.g., cholesterol), a stealth lipid (e.g., a PEG lipid, such as PEG2k-DMG), and optionally a neutral lipid (e.g., DSPC).

[0613] In some embodiments, a method of reducing TTR serum concentration is provided comprising administering a corticosteroid and a guide RNA as described herein, e.g., comprising any one or more of the guide sequences of SEQ ID NOs: 5-82, or any one or more of the sgRNAs of SEQ ID Nos: 87-124. In some embodiments, gRNAs comprising any one or more of the guide sequences of SEQ ID NOs: 5-82 or any one or more of the sgRNAs of SEQ ID Nos: 87-124 are administered to reduce or prevent the accumulation of TTR in amyloids or amyloid fibrils. The gRNA is administered together with a nucleic acid or vector described herein encoding an RNA-guided DNA nuclease such as a Cas nuclease (e.g., Cas9). In some embodiments, the RNA-guided DNA nuclease is a Cas cleavase. In some embodiments, the RNA-guided DNA nuclease is a Cas from a Type-II CRISPR/Cas system. In some embodiments, the RNA-guided DNA nuclease is a Cas9. In some embodiments, the RNA-guided DNA nuclease is an S. pyogenes Cas9 nuclease. In particular embodiments, the guide RNA is chemically modified. In some embodiments, the guide RNA and the nucleic acid encoding an RNA-guided DNA nuclease are administered in an LNP described herein, such as an LNP comprising a CCD lipid (e.g., an amine lipid, such as lipid A), a helper lipid (e.g., cholesterol), a stealth lipid (e.g., a PEG lipid, such as PEG2k-DMG), and optionally a neutral lipid (e.g., DSPC).

[0614] In some embodiments, a method of reducing TTR serum concentration is provided comprising administering a guide RNA as described herein, e.g., comprising any one or more of the guide sequences of SEQ ID NOs: 5-72, 74-78, and 80-82, or any one or more of the sgRNAs of SEQ ID Nos: 87-113, 115-120, and 122-124. In some embodiments, gRNAs comprising any one or more of the guide sequences of SEQ ID NOs: 5-72, 74-78, and 80-82, or any one or more of the sgRNAs of SEQ ID Nos: 87-113, 115-120, and 122-124 are administered to reduce or prevent the accumulation of TTR in amyloids or amyloid fibrils. The guide RNA is optionally administered together with an RNA-guided DNA nuclease such as a Cas nuclease (e.g., Cas9) or a nucleic acid or vector described herein encoding an RNA-guided DNA nuclease. In some embodiments, the RNA-guided DNA nuclease is a Cas cleavase. In some embodiments, the RNA-guided DNA nuclease is a Cas from a Type-II CRISPR/Cas system. In some embodiments, the RNA-guided DNA nuclease is a Cas9. In some embodiments, the RNA-guided DNA nuclease is an S. pyogenes Cas9 nuclease. In particular embodiments, the guide RNA is chemically modified. In some embodiments, the guide RNA and the nucleic acid encoding an RNA-guided DNA nuclease are administered in an LNP described herein, such as an LNP comprising a CCD lipid (e.g., an amine lipid, such as lipid A), a helper lipid (e.g., cholesterol), a stealth lipid (e.g., a PEG lipid, such as PEG2k-DMG) and optionally a neutral lipid (e.g., DSPC).

[0615] In some embodiments, a method of reducing or preventing the accumulation of TTR in amyloids or amyloid fibrils of a subject is provided comprising administering a corticosteroid and a composition comprising a guide RNA as described herein, e.g., comprising any one or more of the guide sequences of SEQ ID NOs: 5-82, or any one or more of the sgRNAs of SEQ ID Nos: 87-124. In some embodiments, a method of reducing or preventing the accumulation of TTR in amyloids or amyloid fibrils of a subject is provided comprising administering a corticosteroid and a composition comprising any one or more of the sgRNAs of SEQ ID Nos: 87-113. In some embodiments, gRNAs comprising any one or more of the guide sequences of SEQ ID NOs: 5-82 or any one or more of the sgRNAs of SEQ ID Nos: 87-124 are administered to reduce or prevent the accumulation of TTR in amyloids or amyloid fibrils. The gRNA is optionally administered together with a nucleic acid or vector described herein encoding an RNA-guided DNA nuclease such as a Cas nuclease (e.g., Cas9). In some embodiments, the RNA-guided DNA nuclease is a Cas cleavase. In some embodiments, the RNA-guided DNA nuclease is a Cas from a Type-II CRISPR/Cas system. In some embodiments, the RNA-guided DNA nuclease is a Cas9. In some embodiments, the RNA-guided DNA nuclease is an S. pyogenes Cas9 nuclease. In particular embodiments, the guide RNA is chemically modified. In some embodiments, the guide RNA and the nucleic acid encoding an RNA-guided DNA nuclease are administered in an LNP described herein, such as an LNP comprising a CCD lipid (e.g., an amine lipid, such as lipid A), a helper lipid (e.g., cholesterol), a stealth lipid (e.g., a PEG lipid, such as PEG2k-DMG), and optionally a neutral lipid (e.g., DSPC).

[0616] In some embodiments, a method of reducing or preventing the accumulation of TTR in amyloids or amyloid fibrils of a subject is provided comprising administering a composition comprising a guide RNA as described herein, e.g., comprising any one or more of the guide sequences of SEQ ID NOs: 5-72, 74-78, and 80-82, or any one or more of the sgRNAs of SEQ ID Nos: 87-124. In some embodiments, a method of reducing or preventing the accumulation of TTR in amyloids or amyloid fibrils of a subject is provided comprising administering a composition comprising any one or more of the sgRNAs of SEQ ID Nos: 87-113, 115-120, and 122-124. In some embodiments, gRNAs comprising any one or more of the guide sequences of SEQ ID NOs: 5-72, 74-78, and 80-82 or any one or more of the sgRNAs of SEQ ID Nos: 87-113, 115-120, and 122-124 are administered to reduce or prevent the accumulation of TTR in amyloids or amyloid fibrils. The guide RNA is optionally administered together with an RNA-guided DNA nuclease such as a Cas nuclease (e.g., Cas9) or a nucleic acid or vector described herein encoding an RNA-guided DNA nuclease. In some embodiments, the RNA-guided DNA nuclease is a Cas cleavase. In some embodiments, the RNA-guided DNA nuclease is a Cas from a Type-II CRISPR/Cas system. In some embodiments, the RNA-guided DNA nuclease is a Cas9. In some embodiments, the RNA-guided DNA nuclease is an S. pyogenes Cas9 nuclease. In particular embodiments, the guide RNA is chemically modified. In some embodiments, the guide RNA and the nucleic acid encoding an RNA-guided DNA nuclease are administered in an LNP described herein, such as an LNP comprising a CCD lipid (e.g., an amine lipid, such as lipid A), a helper lipid (e.g., cholesterol), a stealth lipid (e.g., a PEG lipid, such as PEG2k-DMG), and optionally a neutral lipid (e.g., DSPC).

[0617] In some embodiments, the gRNA comprising a guide sequence of Table 1 or one or more sgRNAs from Table 2 together with an RNA-guided DNA nuclease such as a Cas nuclease translated from the nucleic acid induce DSBs, and non-homologous ending joining (NHEJ) during repair leads to a mutation in the TTR gene. In some embodiments, NHEJ leads to a deletion or insertion of a nucleotide(s), which induces a frame shift or nonsense mutation in the TTR gene.

[0618] In some embodiments, administering the corticosteroid and the guide RNA (and optionally an RNA-guided DNA binding agent or a nucleic acid encoding an RNA-guided DNA binding agent) (e.g., in a composition provided herein) reduces levels (e.g., serum levels) of TTR in the subject, and therefore prevents accumulation and aggregation of TTR in amyloids or amyloid fibrils.

[0619] In some embodiments, reducing or preventing the accumulation of TTR in amyloids or amyloid fibrils of a subject comprises reducing or preventing TTR deposition in one or more tissues of the subject, such as stomach, colon, or nervous tissue. In some embodiments, the nervous tissue comprises sciatic nerve or dorsal root ganglion. In some embodiments, TTR deposition is reduced in two, three, or four of the stomach, colon, dorsal root ganglion, and sciatic nerve. The level of deposition in a given tissue can be determined using a biopsy sample, e.g., using immunostaining. In some embodiments, reducing or preventing the accumulation of TTR in amyloids or amyloid fibrils of a subject and/or reducing or preventing TTR deposition is inferred based on reducing serum TTR levels for a period of time. As discussed in the examples, it has been found that reducing serum TTR levels in accordance with methods and uses provided herein can result in clearance of deposited TTR from tissues such as those discussed above and in the examples, e.g., as measured 8 weeks after administration of the composition.

[0620] In some embodiments, the subject is mammalian. In some embodiments, the subject is human. In some embodiments, the subject is cow, pig, monkey, sheep, dog, cat, fish, or poultry.

[0621] In some embodiments, the use of one or more guide RNAs as described herein, e.g., comprising any one or more of the guide sequences in Table 1 or one or more sgRNAs from Table 2 (e.g., in a composition provided herein) and of a nucleic acid (e.g., mRNA) described herein encoding an RNA-guided DNA-binding agent is provided for the preparation of a medicament for treating a human subject having ATTR. The RNA-guided DNA-binding agent may be a Cas9, e.g. an S. pyogenes Cas9. In particular embodiments, the guide RNA is chemically modified.

[0622] In some embodiments, the composition comprising the guide RNA and nucleic acid is administered intravenously. In some embodiments, the composition comprising the guide RNA and nucleic acid is administered into the hepatic circulation.

[0623] In some embodiments, a single administration of a composition comprising a guide RNA (and optionally an RNA-guided DNA binding agent or a nucleic acid encoding an RNA-guided DNA binding agent) provided herein is sufficient to knock down expression of the mutant protein. In some embodiments, a single administration of a composition comprising a guide RNA (and optionally an RNA-guided DNA binding agent or a nucleic acid encoding an RNA-guided DNA binding agent) provided herein is sufficient to knock out expression of the mutant protein in a population of cells. In other embodiments, more than one administration of a composition comprising a guide RNA (and optionally an RNA-guided DNA binding agent or a nucleic acid encoding an RNA-guided DNA binding agent) provided herein may be beneficial to maximize editing via cumulative effects. For example, a composition provided herein can be administered 2, 3, 4, 5, or more times, such as 2 times. Administrations can be separated by a period of time ranging from, e.g., 1 day to 2 years, such as 1 to 7 days, 7 to 14 days, 14 days to 30 days, 30 days to 60 days, 60 days to 120 days, 120 days to 183 days, 183 days to 274 days, 274 days to 366 days, or 366 days to 2 years.

[0624] In some embodiments, a composition is administered in an effective amount in the range of 0.01 to 10 mg/kg (mpk), e.g., 0.01 to 0.1 mpk, 0.1 to 0.3 mpk, 0.3 to 0.5 mpk, 0.5 to 1 mpk, 1 to 2 mpk, 2 to 3 mpk, 3 to 5 mpk, 5 to 10 mpk, or 0.1, 0.2, 0.3, 0.5, 1, 2, 3, 5, or 10 mpk. In some embodiments, a composition is administered in the amount of 2-4 mpk, such as 2.5-3.5 mpk. In some embodiments, a composition is administered in the amount of about 3 mpk. As reported herein, for an LNP composition, the dosage or effective amount is assessed by total RNA administered.

[0625] In some embodiments, the efficacy of treatment with the compositions of the invention is seen at 1 year, 2 years, 3 years, 4 years, 5 years, or 10 years after delivery. In some embodiments, efficacy of treatment with the compositions of the invention is assessed by measuring serum levels of TTR before and after treatment. In some embodiments, efficacy of treatment with the compositions assessed via a reduction of serum levels of TTR is seen at 1 week, 2 weeks, 3 weeks, 4 weeks, 2 months, 3 months, 4 months, 5 months, 6 months, 7 months, 8 months, 9 months, 10 months, or at 11 months.

[0626] In some embodiments, treatment slows or halts disease progression.

[0627] In some embodiments, treatment slows or halts progression of FAP. In some embodiments, treatment results in improvement, stabilization, or slowing of change in symptoms of sensorimotor neuropathy or autonomic neuropathy.

[0628] In some embodiments, treatment results in improvement, stabilization, or slowing of change in symptoms of FAC. In some embodiments, treatment results in improvement, stabilization, or slowing of change symptoms of restrictive cardiomyopathy or congestive heart failure.

[0629] In some embodiments, efficacy of treatment is measured by increased survival time of the subject. In some embodiments, efficacy of treatment is measured by increased tolerability of the treatment. In some embodiments, increased tolerability, e.g. cytokine, complement, or other immune response is measured.

[0630] In some embodiments, efficacy of treatment is measured by improvement or slowing of progression in symptoms of sensorimotor or autonomic neuropathy. In some embodiments, efficacy of treatment is measured by an increase or a slowing of decrease in ability to move an area of the body or to feel in any area of the body. In some embodiments, efficacy of treatment is measured by improvement or a slowing of decrease in the ability to swallow; breath; use arms, hands, legs, or feet; or walk. In some embodiments, efficacy of treatment is measured by improvement or a slowing of progression of neuralgia. In some embodiments, the neuralgia is characterized by pain, burning, tingling, or abnormal feeling. In some embodiments, efficacy of treatment is measured by improvement or a slowing of increase in postural hypotension, dizziness, gastrointestinal dysmotility, bladder dysfunction, or sexual dysfunction. In some embodiments, efficacy of treatment is measured by improvement or a slowing of progression of weakness. In some embodiments, efficacy of treatment is measured using electromyogram, nerve conduction tests, or patient-reported outcomes.

[0631] In some embodiments, efficacy of treatment is measured by improvement or slowing of progression of symptoms of congestive heart failure or CHF. In some embodiments, efficacy of treatment is measured by an decrease or a slowing of increase in shortness of breath, trouble breathing, fatigue, or swelling in the ankles, feet, legs, abdomen, or veins in the neck. In some embodiments, efficacy of treatment is measured by improvement or a slowing of progression of fluid buildup in the body, which may be assessed by measures such as weight gain, frequent urination, or nighttime cough. In some embodiments, efficacy of treatment is measured using cardiac biomarker tests (such as B-type natriuretic peptide [BNP] or N-terminal pro b-type natriuretic peptide [NT-proBNP]), lung function tests, chest x-rays, or electrocardiography.

[0632] A. Combination Therapy

[0633] In some embodiments, the invention comprises combination therapies comprising administering a corticosteroid and any one of the gRNAs comprising any one or more of the guide sequences disclosed in Table 1 or any one or more of the sgRNAs in Table 2 (and optionally an RNA-guided DNA binding agent or a nucleic acid described herein encoding an RNA-guided DNA binding agent, such as a nucleic acid (e.g. mRNA) or vector described herein encoding an S. pyogenes Cas9) (e.g., in a composition provided herein) together with an additional therapy suitable for alleviating symptoms of ATTR. In particular embodiments, the guide RNA is chemically modified. In some embodiments, the guide RNA and the nucleic acid encoding an RNA-guided DNA nuclease are administered in an LNP described herein, such as an LNP comprising a CCD lipid (e.g., an amine lipid, such as lipid A), a helper lipid (e.g., cholesterol), a stealth lipid (e.g., a PEG lipid, such as PEG2k-DMG), and optionally a neutral lipid (e.g., DSPC).

[0634] In some embodiments, the additional therapy for ATTR is a treatment for sensorimotor or autonomic neuropathy. In some embodiments, the treatment for sensorimotor or autonomic neuropathy is a nonsteroidal anti-inflammatory drug, antidepressant, anticonvulsant medication, antiarrythmic medication, or narcotic agent. In some embodiments, the antidepressant is a tricylic agent or a serotonin-norepinephrine reuptake inhibitor. In some embodiments, the antidepressant is amitriptyline, duloxetine, or venlafaxine. In some embodiments, the anticonvulsant agent is gabapentin, pregabalin, topiramate, or carbamazepine. In some embodiments, the additional therapy for sensorimotor neuropathy is transcutaneous electrical nerve stimulation.

[0635] In some embodiments, the additional therapy for ATTR is a treatment for restrictive cardiomyopathy or congestive heart failure (CHF). In some embodiments, the treatment for CHF is a ACE inhibitor, aldosterone antagonist, angiotensin receptor blocker, beta blocker, digoxin, diuretic, or isosorbide dinitrate/hydralazine hydrochloride. In some embodiments, the ACE inhibitor is enalapril, captopril, ramipril, perindopril, imidapril, or quinapril. In some embodiments, the aldosterone antagonist is eplerenone or spironolactone. In some embodiments, the angiotensin receptor blocker is azilsartan, cadesartan, eprosartan, irbesartan, losartan, olmesartan, telmisartan, or valsartan. In some embodiments, the beta blocker is acebutolol, atenolol, bisoprolol, metoprolol, nadolol, nebivolol, or propranolol. In some embodiments, the diuretic is chlorothiazide, chlorthalidone, hydrochlorothiazide, indapamide, metolazone, bumetanide, furosemide, torsemide, amiloride, or triameterene.

[0636] In some embodiments, the combination therapy comprises administering a corticosteroid and any one of the gRNAs comprising any one or more of the guide sequences disclosed in Table 1 or any one or more of the sgRNAs in Table 2 (and optionally an RNA-guided DNA binding agent or a nucleic acid described herein encoding an RNA-guided DNA binding agent) (e.g., in a composition provided herein) together with a siRNA that targets TTR or mutant TTR. In some embodiments, the siRNA is any siRNA capable of further reducing or eliminating the expression of wild type or mutant TTR. In some embodiments, the siRNA is the drug Patisiran (ALN-TTR02) or ALN-TTRsc02. In some embodiments, the siRNA is administered after any one of the gRNAs comprising any one or more of the guide sequences disclosed in Table 1 or any one or more of the sgRNAs in Table 2 (e.g., in a composition provided herein). In some embodiments, the siRNA is administered on a regular basis following treatment with any of the gRNA compositions provided herein.

[0637] In some embodiments, the combination therapy comprises administering a corticosteroid and any one of the gRNAs comprising any one or more of the guide sequences disclosed in Table 1 or any one or more of the sgRNAs in Table 2 (and optionally an RNA-guided DNA binding agent or a nucleic acid described herein encoding an RNA-guided DNA binding agent) (e.g., in a composition provided herein) together with antisense nucleotide that targets TTR or mutant TTR. In some embodiments, the antisense nucleotide is any antisense nucleotide capable of further reducing or eliminating the expression of wild type or mutant TTR. In some embodiments, the antisense nucleotide is the drug Inotersen (IONS-TTR_{Rx}). In some embodiments, the antisense nucleotide is administered after any one of the gRNAs comprising any one or more of the guide sequences disclosed in Table 1 or any one or more of the sgRNAs in Table 2 and a nucleic acid encoding an RNA-guided DNA-binding agent (e.g., in a composition provided herein). In some embodiments, the antisense nucleotide is administered on a regular basis following treatment with any of the gRNA compositions provided herein.

[0638] In some embodiments, the combination therapy comprises administering a corticosteroid and any one of the gRNAs comprising any one or more of the guide sequences disclosed in Table 1 or any one or more of the sgRNAs in Table 2 (and optionally an RNA-guided DNA binding agent or a nucleic acid described herein encoding an RNA-guided DNA binding agent) (e.g., in a composition provided herein) together with a small molecule stabilizer that promotes kinetic stabilization of the correctly folded tetrameric form of TTR. In some embodiments, the small molecule stabilizer is the drug tafamidis (Vyndaqel®) or diflunisal. In some embodiments, the small molecule stabilizer is administered after any one of the gRNAs comprising any one or more of the guide sequences disclosed in Table 1 or any one or more of the sgRNAs in Table 2 (e.g., in a composition provided herein). In some embodiments, the small molecule stabilizer is administered on a regular basis following treatment with any of the compositions provided herein.

[0639] In any of the foregoing embodiments, the guide sequences disclosed in Table 1 may be selected from SEQ ID NOs: 5-72, 74-78, and 80-82, and/or the sgRNAs in Table 2 may be selected from SEQ ID Nos: 87-113, 115-120, and 122-124, and/or the guide RNA may be a chemically modified guide RNA.

[0640] B. Delivery of Nucleic Acid Compositions

[0641] In some embodiments, the nucleic acid compositions described herein, comprising a gRNA, and optionally a nucleic acid described herein encoding an RNA-guided DNA-binding agent as RNA or encoded on one or more vectors, are formulated in or administered via a lipid nanoparticle; see e.g., WO2017173054A1 published Oct. 5, 2017 and WO2019067992A1 published Apr. 4, 2019, the contents of which are hereby incorporated by reference in their entirety. Any lipid nanoparticle (LNP) known to those of skill in the art to be capable of delivering nucleotides to subjects may be utilized with the guide RNAs described herein, and optionally the nucleic acid encoding an RNA-guided DNA nuclease.

[0642] Disclosed herein are various embodiments of LNP formulations for RNAs, including CRISPR/Cas cargoes. Such LNP formulations may include (i) a CCD lipid, such as an amine lipid, (ii) a neutral lipid, (iii) a helper lipid, and (iv) a stealth lipid, such as a PEG lipid. Some embodiments of the LNP formulations include an “amine lipid”, along with a helper lipid, a neutral lipid, and a stealth lipid such as a PEG lipid. In some embodiments, the LNP formulations include less than 1 percent neutral phospholipid. In some embodiments, the LNP formulations include less than 0.5 percent neutral phospholipid. By “lipid nanoparticle” is meant a particle that comprises a plurality of (i.e. more than one) lipid molecules physically associated with each other by intermolecular forces.

[0643] CCD Lipids

[0644] Lipid compositions for delivery of CRISPR/Cas mRNA and guide RNA components to a target cell, such as a liver cell comprise a CCD Lipid.

[0645] In some embodiments, the CCD lipid is Lipid A, which is (9Z,12Z)-3-((4,4-bis(octyloxy)butanoyDoxy)-2-((((3-(diethylamino)propoxy)carbonyl)oxy)methyl)propyl octadeca-9,12-dienoate, also called 3-((4,4-bis(octyloxy)butanoyl)oxy)-2-((((3-(diethylamino)propoxy)carbonyl)oxy)methyl)propyl (9Z,12Z)-octadeca-9,12-dienoate. Lipid A can be depicted as:

[chemical structure]

[0646] Lipid A may be synthesized according to WO2015/095340 (e.g., pp. 84-86).

[0647] In some embodiments, the CCD lipid is Lipid B, which is ((5-((dimethylamino)methyl)-1,3-phenylene)bis(oxy))bis(octane-8,1-diyl)bis(decanoate), also called ((5-((dimethylamino)methyl)-1,3-phenylene)bis(oxy))bis(octane-8,1-diyl) bis(decanoate). Lipid B can be depicted as:

[chemical structure]

[0648] Lipid B may be synthesized according to WO2014/136086 (e.g., pp. 107-09).

[0649] In some embodiments, the CCD lipid is Lipid C, which is 2-((4-(((3-(dimethylamino)propoxy)carbonyl)oxy)hexadecanoyl)oxy)propane-1,3-diyl (9Z,9′Z,12Z,12′Z)-bis(octadeca-9,12-dienoate). Lipid C can be depicted as:

[chemical structure]

[0650] In some embodiments, the CCD lipid is Lipid D, which is 3-(((3-(dimethylamino)propoxy)carbonyl)oxy)-13-(octanoyloxy)tridecyl 3-octylundecanoate.

[0651] Lipid D can be depicted as:

[chemical structure]

[0652] Lipid C and Lipid D may be synthesized according to WO2015/095340.

[0653] The CCD lipid can also be an equivalent to Lipid A, Lipid B, Lipid C, or Lipid D. In certain embodiments, the CCD lipid is an equivalent to Lipid A, an equivalent to Lipid B, an equivalent to Lipid C, or an equivalent to Lipid D.

[0654] Amine Lipids

[0655] In some embodiments, the LNP compositions for the delivery of biologically active agents comprise an “amine lipid”, which is defined as Lipid A, Lipid B, Lipid C, Lipid D or equivalents of Lipid A (including acetal analogs of Lipid A), equivalents of Lipid B, equivalents of Lipid C, and equivalents of Lipid D.

[0656] In some embodiments, the amine lipid is Lipid A, which is (9Z,12Z)-3-((4,4-bis(octyloxy)butanoyl)oxy)-2-((((3-(diethylamino)propoxy)carbonyl)oxy)methyl)propyl octadeca-9,12-dienoate, also called 3-((4,4-bis(octyloxy)butanoyl)oxy)-2-((((3-(diethylamino)propoxy)carbonyl)oxy)methyl)propyl (9Z,12Z)-octadeca-9,12-dienoate. Lipid A can be depicted as:

[chemical structure]

[0657] Lipid A may be synthesized according to WO2015/095340 (e.g., pp. 84-86). In certain embodiments, the amine lipid is an equivalent to Lipid A.

[0658] In certain embodiments, an amine lipid is an analog of Lipid A. In certain embodiments, a Lipid A analog is an acetal analog of Lipid A. In particular LNP compositions, the acetal analog is a C4-C12 acetal analog. In some embodiments, the acetal analog is a C5-C12 acetal analog. In additional embodiments, the acetal analog is a C5-C10 acetal analog. In further embodiments, the acetal analog is chosen from a C4, C5, C6, C7, C9, C10, C11, and C12 acetal analog.

[0659] Amine lipids suitable for use in the LNPs described herein are biodegradable in vivo and suitable for delivering a biologically active agent, such as an RNA to a cell. The amine lipids have low toxicity (e.g., are tolerated in an animal model without adverse effect in amounts of greater than or equal to 10 mg/kg of RNA cargo). In certain embodiments, LNPs comprising an amine lipid include those where at least 75% of the amine lipid is cleared from the plasma within 8, 10, 12, 24, or 48 hours, or 3, 4, 5, 6, 7, or 10 days. In certain embodiments, LNPs comprising an amine lipid include those where at least 50% of the mRNA or gRNA is cleared from the plasma within 8, 10, 12, 24, or 48 hours, or 3, 4, 5, 6, 7, or 10 days. In certain embodiments, LNPs comprising an amine lipid include those where at least 50% of the LNP is cleared from the plasma within 8, 10, 12, 24, or 48 hours, or 3, 4, 5, 6, 7, or 10 days, for example by measuring a lipid (e.g., an amine lipid), RNA (e.g., mRNA), or another component. In certain embodiments, lipid-encapsulated versus free lipid, RNA, or nucleic acid component of the LNP is measured.

[0660] Lipid clearance may be measured as described in literature. See Maier, M. A., et al. Biodegradable Lipids Enabling Rapidly Eliminated Lipid Nanoparticles for Systemic Delivery of RNAi Therapeutics. Mol. Ther. 2013, 21(8), 1570-78 (“Maier”). For example, in Maier, LNP-siRNA systems containing luciferases-targeting siRNA were administered to six- to eight-week old male C57Bl/6 mice at 0.3 mg/kg by intravenous bolus injection via the lateral tail vein. Blood, liver, and spleen samples were collected at 0.083, 0.25, 0.5, 1, 2, 4, 8, 24, 48, 96, and 168 hours post-dose. Mice were perfused with saline before tissue collection and blood samples were processed to obtain plasma. All samples were processed and analyzed by LC-MS. Further, Maier describes a procedure for assessing toxicity after administration of LNP-siRNA formulations. For example, a luciferase-targeting siRNA was administered at 0, 1, 3, 5, and 10 mg/kg (5 animals/group) via single intravenous bolus injection at a dose volume of 5 mL/kg to male Sprague-Dawley rats. After 24 hours, about 1 mL of blood was obtained from the jugular vein of conscious animals and the serum was isolated. At 72 hours post-dose, all animals were euthanized for necropsy. Assessments of clinical signs, body weight, serum chemistry, organ weights and histopathology were performed. Although Maier describes methods for assessing siRNA-LNP formulations, these methods may be applied to assess clearance, pharmacokinetics, and toxicity of administration of LNP compositions of the present disclosure.

[0661] The amine lipids may lead to an increased clearance rate. In some embodiments, the clearance rate is a lipid clearance rate, for example the rate at which a lipid is cleared from the blood, serum, or plasma. In some embodiments, the clearance rate is an RNA clearance rate, for example the rate at which an mRNA or a gRNA is cleared from the blood, serum, or plasma. In some embodiments, the clearance rate is the rate at which LNP is cleared from the blood, serum, or plasma. In some embodiments, the clearance rate is the rate at which LNP is cleared from a tissue, such as liver tissue or spleen tissue. In certain embodiments, a high clearance rate leads to a safety profile with no substantial adverse effects. The amine lipids may reduce LNP accumulation in circulation and in tissues. In some embodiments, a reduction in LNP accumulation in circulation and in tissues leads to a safety profile with no substantial adverse effects.

[0662] The amine lipids of the present disclosure are ionizable (e.g., may form a salt) depending upon the pH of the medium they are in. For example, in a slightly acidic medium, the amine lipids may be protonated and thus bear a positive charge. Conversely, in a slightly basic medium, such as, for example, blood, where pH is approximately 7.35, the amine lipids may not be protonated and thus bear no charge. In some embodiments, the amine lipids of the present disclosure may be protonated at a pH of at least about 9. In some embodiments, the amine lipids of the present disclosure may be protonated at a pH of at least about 9. In some embodiments, the amine lipids of the present disclosure may be protonated at a pH of at least about 10.

[0663] The pH at which an amine lipid is predominantly protonated is related to its intrinsic pKa. In some embodiments, the amine lipids of the present disclosure may each, independently, have a pKa in the range of from about 5.1 to about 7.4. In some embodiments, the amine lipids of the present disclosure may each, independently, have a pKa in the range of from about 5.5 to about 6.6. In some embodiments, the amine lipids of the present disclosure may each, independently, have a pKa in the range of from about 5.6 to about 6.4. In some embodiments, the amine lipids of the present disclosure may each, independently, have a pKa in the range of from about 5.8 to about 6.2. For example, the amine lipids of the present disclosure may each, independently, have a pKa in the range of from about 5.8 to about 6.5. The pKa of an amine lipid can be an important consideration in formulating LNPs as it has been found that cationic lipids with a pKa ranging from about 5.1 to about 7.4 are effective for delivery of cargo in vivo, e.g., to the liver. Furthermore, it has been found that cationic lipids with a pKa ranging from about 5.3 to about 6.4 are effective for delivery in vivo, e.g., to tumors. See, e.g., WO 2014/136086.

[0664] Additional Lipids

[0665] “Neutral lipids” suitable for use in a lipid composition of the disclosure include, for example, a variety of neutral, uncharged or zwitterionic lipids. Examples of neutral phospholipids suitable for use in the present disclosure include, but are not limited to, 5-heptadecylbenzene-1,3-diol (resorcinol), dipalmitoylphosphatidylcholine (DPPC), distearoylphosphatidylcholine (DSPC), pohsphocholine (DOPC), dimyristoylphosphatidylcholine (DMPC), phosphatidylcholine (PLPC), 1,2-distearoyl-sn-glycero-3-phosphocholine (DAPC), phosphatidylethanolamine (PE), egg phosphatidylcholine (EPC), dilauryloylphosphatidylcholine (DLPC), dimyristoylphosphatidylcholine (DMPC), 1-myristoyl-2-palmitoyl phosphatidylcholine (MPPC), 1-palmitoyl-2-myristoyl phosphatidylcholine (PMPC), 1-palmitoyl-2-stearoyl phosphatidylcholine (PSPC), 1,2-diarachidoyl-sn-glycero-3-phosphocholine (DBPC), 1-stearoyl-2-palmitoyl phosphatidylcholine (SPPC), 1,2-dieicosenoyl-sn-glycero-3-phosphocholine (DEPC), palmitoyloleoyl phosphatidylcholine (POPC), lysophosphatidyl choline, dioleoyl phosphatidylethanolamine (DOPE), dilinoleoylphosphatidylcholine distearoylphosphatidylethanolamine (DSPE), dimyristoyl phosphatidylethanolamine (DMPE), dipalmitoyl phosphatidylethanolamine (DPPE), palmitoyloleoyl phosphatidylethanolamine (POPE), lysophosphatidylethanolamine and combinations thereof. In one embodiment, the neutral phospholipid may be selected from the group consisting of distearoylphosphatidylcholine (DSPC) and dimyristoyl phosphatidyl ethanolamine (DMPE). In another embodiment, the neutral phospholipid may be distearoylphosphatidylcholine (DSPC). In another embodiment, the neutral phospholipid may be dipalmitoylphosphatidylcholine (DPPC).

[0666] “Helper lipids” include steroids, sterols, and alkyl resorcinols. Helper lipids suitable for use in the present disclosure include, but are not limited to, cholesterol, 5-heptadecylresorcinol, and cholesterol hemisuccinate. In one embodiment, the helper lipid may be cholesterol. In one embodiment, the helper lipid may be cholesterol hemisuccinate.

[0667] “Stealth lipids” are lipids that alter the length of time the nanoparticles can exist in vivo (e.g., in the blood). Stealth lipids may assist in the formulation process by, for example, reducing particle aggregation and controlling particle size. Stealth lipids used herein may modulate pharmacokinetic properties of the LNP. Stealth lipids suitable for use in a lipid composition of the disclosure include, but are not limited to, stealth lipids having a hydrophilic head group linked to a lipid moiety. Stealth lipids suitable for use in a lipid composition of the present disclosure and information about the biochemistry of such lipids can be found in Romberg et al., Pharmaceutical Research, Vol. 25, No. 1, 2008, pg. 55-71 and Hoekstra et al., Biochimica et Biophysica Acta 1660 (2004) 41-52. Additional suitable PEG lipids are disclosed, e.g., in WO 2006/007712.

[0668] In one embodiment, the hydrophilic head group of stealth lipid comprises a polymer moiety selected from polymers based on PEG. Stealth lipids may comprise a lipid moiety. In some embodiments, the stealth lipid is a PEG lipid. PEG lipids may assist in the formulation process by, for example, reducing particle aggregation and controlling particle size. PEG lipids used herein may modulate pharmacokinetic properties of the LNPs. Typically, the PEG lipid comprises a lipid moiety and a polymer moiety based on PEG.

[0669] In one embodiment, a stealth lipid comprises a polymer moiety selected from polymers based on PEG (sometimes referred to as poly(ethylene oxide)), poly(oxazoline), poly(vinyl alcohol), poly(glycerol), poly(N-vinylpyrrolidone), polyaminoacids and poly[N-(2-hydroxypropyl)methacrylamide].

[0670] In one embodiment, the PEG lipid comprises a polymer moiety based on PEG (sometimes referred to as poly(ethylene oxide)).

[0671] The PEG lipid further comprises a lipid moiety. In some embodiments, the lipid moiety may be derived from diacylglycerol or diacylglycamide, including those comprising a dialkylglycerol or dialkylglycamide group having alkyl chain length independently comprising from about C4 to about C40 saturated or unsaturated carbon atoms, wherein the chain may comprise one or more functional groups such as, for example, an amide or ester. In some embodiments, the alkyl chail length comprises about C10 to C20. The dialkylglycerol or dialkylglycamide group can further comprise one or more substituted alkyl groups. The chain lengths may be symmetrical or assymetric.

[0672] Unless otherwise indicated, the term “PEG” as used herein means any polyethylene glycol or other polyalkylene ether polymer. In one embodiment, PEG is an optionally substituted linear or branched polymer of ethylene glycol or ethylene oxide. In one embodiment, PEG is unsubstituted. In one embodiment, the PEG is substituted, e.g., by one or more alkyl, alkoxy, acyl, hydroxy, or aryl groups. In one embodiment, the term includes PEG copolymers such as PEG-polyurethane or PEG-polypropylene (see, e.g., J. Milton Harris, Poly(ethylene glycol) chemistry: biotechnical and biomedical applications (1992)); in another embodiment, the term does not include PEG copolymers. In one embodiment, the PEG has a molecular weight of from about 130 to about 50,000, in a sub-embodiment, about 150 to about 30,000, in a sub-embodiment, about 150 to about 20,000, in a sub-embodiment about 150 to about 15,000, in a sub-embodiment, about 150 to about 10,000, in a sub-embodiment, about 150 to about 6,000, in a sub-embodiment, about 150 to about 5,000, in a sub-embodiment, about 150 to about 4,000, in a sub-embodiment, about 150 to about 3,000, in a sub-embodiment, about 300 to about 3,000, in a sub-embodiment, about 1,000 to about 3,000, and in a sub-embodiment, about 1,500 to about 2,500.

[0673] In certain embodiments, the PEG (e.g., conjugated to a lipid moiety or lipid, such as a stealth lipid), is a “PEG-2K,” also termed “PEG 2000,” which has an average molecular weight of about 2,000 daltons. PEG-2K is represented herein by the following formula (I), wherein n is 45, meaning that the number averaged degree of polymerization comprises about 45 subunits. However, other PEG embodiments known in the art may be used, including, e.g., those where the number-averaged degree of polymerization comprises about 23 subunits (n=23), and/or 68 subunits (n=68). In some embodiments, n may range from about 30 to about 60. In some embodiments, n may range from about 35 to about 55. In some embodiments, n may range from about 40 to about 50. In some embodiments, n may range from about 42 to about 48. In some embodiments, n may be 45. In some embodiments, R may be selected from H, substituted alkyl, and unsubstituted alkyl. In some embodiments, R may be unsubstituted alkyl. In some embodiments, R may be methyl.

[0674] In any of the embodiments described herein, the PEG lipid may be selected from PEG-dilauroylglycerol, PEG-dimyristoylglycerol (PEG-DMG) (catalog #GM-020 from NOF, Tokyo, Japan), PEG-dipalmitoylglycerol, PEG-distearoylglycerol (PEG-DSPE) (catalog #DSPE-020CN, NOF, Tokyo, Japan), PEG-dilaurylglycamide, PEG-dimyristylglycamide, PEG-dipalmitoylglycamide, and PEG-distearoylglycamide, PEG-cholesterol (1-[8′-(Cholest-5-en-3[beta]-oxy)carboxamido-3′,6′-dioxaoctanyl]carbamoyl-[omega]-methyl-poly(ethylene glycol), PEG-DMB (3,4-ditetradecoxylbenzyl-[omega]-methyl-poly(ethylene glycol)ether), 1,2-dimyristoyl-sn-glycero-3-phosphoethanolamine-N-[methoxy(polyethylene glycol)-2000] (PEG2k-DMG), 1,2-distearoyl-sn-glycero-3-phosphoethanolamine-N-[methoxy(polyethylene glycol)-2000] (PEG2k-DSPE) (cat. #880120C from Avanti Polar Lipids, Alabaster, Ala., USA), 1,2-distearoyl-sn-glycerol, methoxypolyethylene glycol (PEG2k-DSG; GS-020, NOF Tokyo, Japan), poly(ethylene glycol)-2000-dimethacrylate (PEG2k-DMA), and 1,2-distearyloxypropyl-3-amine-N-[methoxy(polyethylene glycol)-2000] (PEG2k-DSA). In one embodiment, the PEG lipid may be PEG2k-DMG. In some embodiments, the PEG lipid may be PEG2k-DSG. In one embodiment, the PEG lipid may be PEG2k-DSPE. In one embodiment, the PEG lipid may be PEG2k-DMA. In one embodiment, the PEG lipid may be PEG2k-C-DMA. In one embodiment, the PEG lipid may be compound 5027, disclosed in WO2016/010840 (paragraphs [00240] to [00244]). In one embodiment, the PEG lipid may be PEG2k-DSA. In one embodiment, the PEG lipid may be PEG2k-C11. In some embodiments, the PEG lipid may be PEG2k-C14. In some embodiments, the PEG lipid may be PEG2k-C16. In some embodiments, the PEG lipid may be PEG2k-C18.

[0675] LNP Formulations

[0676] The LNP may contain (i) an amine lipid for encapsulation and for endosomal escape, (ii) a neutral lipid for stabilization, (iii) a helper lipid, also for stabilization, and (iv) a stealth lipid, such as a PEG lipid. The neutral lipid may be omitted.

[0677] In some embodiments, an LNP composition may comprise an RNA component that includes one or more of an RNA-guided DNA-binding agent, a Cas nuclease mRNA, a Class 2 Cas nuclease mRNA, a Cas9 mRNA, and a gRNA. In some embodiments, an LNP composition includes an mRNA encoding a Class 2 Cas nuclease, e.g. S. pyogenes Cas9, and a gRNA as the RNA component. In certain embodiments, an LNP composition may comprise the RNA component, an amine lipid, a helper lipid, a neutral lipid, and a stealth lipid. In certain LNP compositions, the helper lipid is cholesterol. In other compositions, the neutral lipid is DSPC. In additional embodiments, the stealth lipid is PEG2k-DMG or PEG2k-C11. In certain embodiments, the LNP composition comprises Lipid A or an equivalent of Lipid A; a helper lipid; a neutral lipid; a stealth lipid; and a guide RNA. In certain compositions, the amine lipid is Lipid A. In certain compositions, the amine lipid is Lipid A or an acetal analog thereof; the helper lipid is cholesterol; the neutral lipid is DSPC; and the stealth lipid is PEG2k-DMG.

[0678] In certain embodiments, lipid compositions are described according to the respective molar ratios of the component lipids in the formulation. Embodiments of the present disclosure provide lipid compositions described according to the respective molar ratios of the component lipids in the formulation. In one embodiment, the mol-% of the amine lipid may be from about 30 mol-% to about 60 mol-%. In one embodiment, the mol-% of the amine lipid may be from about 40 mol-% to about 60 mol-%. In one embodiment, the mol-% of the amine lipid may be from about 45 mol-% to about 60 mol-%. In one embodiment, the mol-% of the amine lipid may be from about 50 mol-% to about 60 mol-%. In one embodiment, the mol-% of the amine lipid may be from about 55 mol-% to about 60 mol-%. In one embodiment, the mol-% of the amine lipid may be from about 50 mol-% to about 55 mol-%. In one embodiment, the mol-% of the amine lipid may be about 50 mol-%. In one embodiment, the mol-% of the amine lipid may be about 55 mol-%. In some embodiments, the amine lipid mol-% of the LNP batch will be ±30%, ±25%, ±20%, ±15%, ±10%, ±5%, or ±2.5% of the target mol-%. In some embodiments, the amine lipid mol-% of the LNP batch will be ±4 mol-%, ±3 mol-%, ±2 mol-%, ±1.5 mol-%, ±1 mol-%, ±0.5 mol-%, or ±0.25 mol-% of the target mol-%. All mol-% numbers are given as a fraction of the lipid component of the LNP compositions. In certain embodiments, LNP inter-lot variability of the amine lipid mol-% will be less than 15%, less than 10% or less than 5%.

[0679] In one embodiment, the mol-% of the neutral lipid, e.g., neutral phospholipid, may be from about 5 mol-% to about 15 mol-%. In one embodiment, the mol-% of the neutral lipid, e.g., neutral phospholipid, may be from about 7 mol-% to about 12 mol-%. In one embodiment, the mol-% of the neutral lipid, e.g., neutral phospholipid, may be from about 0 mol-% to about 5 mol-%. In one embodiment, the mol-% of the neutral lipid, e.g., neutral phospholipid, may be from about 0 mol-% to about 10 mol-%. In one embodiment, the mol-% of the neutral lipid, e.g., neutral phospholipid, may be from about 5 mol-% to about 10 mol-%. In one embodiment, the mol-% of the neutral lipid, e.g., neutral phospholipid, may be from about 8 mol-% to about 10 mol-%.

[0680] In one embodiment, the mol-% of the neutral lipid, e.g., neutral phospholipid, may be about 5 mol-%, about 6 mol-%, about 7 mol-%, about 8 mol-%, about 9 mol-%, about 10 mol-%, about 11 mol-%, about 12 mol-%, about 13 mol-%, about 14 mol-%, or about 15 mol-%. In one embodiment, the mol-% of the neutral lipid, e.g., neutral phospholipid, may be about 9 mol-%.

[0681] In one embodiment, the mol-% of the neutral lipid, e.g., neutral phospholipid, may be from about 1 mol-% to about 5 mol-%. In one embodiment, the mol-% of the neutral lipid may be from about 0.1 mol-% to about 1 mol-%. In one embodiment, the mol-% of the neutral lipid such as neutral phospholipid may be about 0.1 mol-%, about 0.2 mol-%, about 0.5 mol-%, 1 mol-%, about 1.5 mol-%, about 2 mol-%, about 2.5 mol-%, about 3 mol-%, about 3.5 mol-%, about 4 mol-%, about 4.5 mol-%, or about 5 mol-%.

[0682] In one embodiment, the mol-% of the neutral lipid, e.g., neutral phospholipid, may be less than about 1 mol-%. In one embodiment, the mol-% of the neutral lipid, e.g., neutral phospholipid, may be less than about 0.5 mol-%. In one embodiment, the mol-% of the neutral lipid, e.g., neutral phospholipid, may be about 0 mol-%, about 0.1 mol-%, about 0.2 mol-%, about 0.3 mol-%, about 0.4 mol-%, about 0.5 mol-%, about 0.6 mol-%, about 0.7 mol-%, about 0.8 mol-%, about 0.9 mol-%, or about 1 mol-%. In some embodiments, the formulations disclosed herein are free of neutral lipid (i.e., 0 mol-% neutral lipid). In some embodiments, the formulations disclosed herein are essentially free of neutral lipid (i.e., about 0 mol-% neutral lipid). In some embodiments, the formulations disclosed herein are free of neutral phospholipid (i.e., 0 mol-% neutral phospholipid). In some embodiments, the formulations disclosed herein are essentially free of neutral phospholipid (i.e., about 0 mol-% neutral phospholipid).

[0683] In some embodiments, the neutral lipid mol-% of the LNP batch will be ±30%, ±25%, ±20%, ±15%, ±10%, ±5%, or ±2.5% of the target neutral lipid mol-%. In certain embodiments, LNP inter-lot variability will be less than 15%, less than 10% or less than 5%.

[0684] In one embodiment, the mol-% of the helper lipid may be from about 20 mol-% to about 60 mol-%. In one embodiment, the mol-% of the helper lipid may be from about 25 mol-% to about 55 mol-%. In one embodiment, the mol-% of the helper lipid may be from about 25 mol-% to about 50 mol-%. In one embodiment, the mol-% of the helper lipid may be from about 25 mol-% to about 40 mol-%. In one embodiment, the mol-% of the helper lipid may be from about 30 mol-% to about 50 mol-%. In one embodiment, the mol-% of the helper lipid may be from about 30 mol-% to about 40 mol-%. In one embodiment, the mol-% of the helper lipid is adjusted based on amine lipid, neutral lipid, and PEG lipid concentrations to bring the lipid component to 100 mol-%. In one embodiment, the mol-% of the helper lipid is adjusted based on amine lipid and PEG lipid concentrations to bring the lipid component to 100 mol-%. In one embodiment, the mol-% of the helper lipid is adjusted based on amine lipid and PEG lipid concentrations to bring the lipid component to at least 99 mol-%. In some embodiments, the helper mol-% of the LNP batch will be ±30%, ±25%, ±20%, ±15%, ±10%, ±5%, or ±2.5% of the target mol-%. In certain embodiments, LNP inter-lot variability will be less than 15%, less than 10% or less than 5%.

[0685] In one embodiment, the mol-% of the PEG lipid may be from about 1 mol-% to about 10 mol-%. In one embodiment, the mol-% of the PEG lipid may be from about 2 mol-% to about 10 mol-%. In one embodiment, the mol-% of the PEG lipid may be from about 2 mol-% to about 8 mol-%. In one embodiment, the mol-% of the PEG lipid may be from about 2 mol-% to about 4 mol-%. In one embodiment, the mol-% of the PEG lipid may be from about 2.5 mol-% to about 4 mol-%. In one embodiment, the mol-% of the PEG lipid may be about 3 mol-%. In one embodiment, the mol-% of the PEG lipid may be about 2.5 mol-%. In some embodiments, the PEG lipid mol-% of the LNP batch will be ±30%, ±25%, ±20%, ±15%, ±10%, ±5%, or ±2.5% of the target PEG lipid mol-%. In certain embodiments, LNP inter-lot variability will be less than 15%, less than 10% or less than 5%.

[0686] In certain embodiments, the cargo includes a nucleic acid encoding an RNA-guided DNA-binding agent (e.g. a Cas nuclease, a Class 2 Cas nuclease, or Cas9), and a gRNA or a nucleic acid encoding a gRNA, or a combination of mRNA and gRNA. In one embodiment, an LNP composition may comprise a Lipid A or its equivalents. In some aspects, the amine lipid is Lipid A. In some aspects, the amine lipid is a Lipid A equivalent, e.g. an analog of Lipid A. In certain aspects, the amine lipid is an acetal analog of Lipid A. In various embodiments, an LNP composition comprises an amine lipid, a neutral lipid, a helper lipid, and a PEG lipid. In certain embodiments, the helper lipid is cholesterol. In certain embodiments, the neutral lipid is DSPC. In specific embodiments, PEG lipid is PEG2k-DMG. In some embodiments, an LNP composition may comprise a Lipid A, a helper lipid, a neutral lipid, and a PEG lipid. In some embodiments, an LNP composition comprises an amine lipid, DSPC, cholesterol, and a PEG lipid. In some embodiments, the LNP composition comprises a PEG lipid comprising DMG. In certain embodiments, the amine lipid is selected from Lipid A, and an equivalent of Lipid A, including an acetal analog of Lipid A. In additional embodiments, an LNP composition comprises Lipid A, cholesterol, DSPC, and PEG2k-DMG.

[0687] In various embodiments, an LNP composition comprises an amine lipid, a helper lipid, a neutral lipid, and a PEG lipid. In various embodiments, an LNP composition comprises an amine lipid, a helper lipid, a neutral phospholipid, and a PEG lipid. In various embodiments, an LNP composition comprises a lipid component that consists of an amine lipid, a helper lipid, a neutral lipid, and a PEG lipid. In various embodiments, an LNP composition comprises an amine lipid, a helper lipid, and a PEG lipid. In certain embodiments, an LNP composition does not comprise a neutral lipid, such as a neutral phospholipid. In various embodiments, an LNP composition comprises a lipid component that consists of an amine lipid, a helper lipid, and a PEG lipid. In certain embodiments, the neutral lipid is chosen from one or more of DSPC, DPPC, DAPC, DMPC, DOPC, DOPE, and DSPE. In certain embodiments, the neutral lipid is DSPC. In certain embodiments, the neutral lipid is DPPC. In certain embodiments, the neutral lipid is DAPC. In certain embodiments, the neutral lipid is DMPC. In certain embodiments, the neutral lipid is DOPC. In certain embodiments, the neutral lipid is DOPE. In certain embodiments, the neutral lipid is DSPE. In certain embodiments, the helper lipid is cholesterol. In specific embodiments, the PEG lipid is PEG2k-DMG. In some embodiments, an LNP composition may comprise a Lipid A, a helper lipid, and a PEG lipid. In some embodiments, an LNP composition may comprise a lipid component that consists of Lipid A, a helper lipid, and a PEG lipid. In some embodiments, an LNP composition comprises an amine lipid, cholesterol, and a PEG lipid. In some embodiments, an LNP composition comprises a lipid component that consists of an amine lipid, cholesterol, and a PEG lipid. In some embodiments, the LNP composition comprises a PEG lipid comprising DMG. In certain embodiments, the amine lipid is selected from Lipid A and an equivalent of Lipid A, including an acetal analog of Lipid A. In certain embodiments, the amine lipid is a C5-C12 or a C4-C12 acetal analog of Lipid A. In additional embodiments, an LNP composition comprises Lipid A, cholesterol, and PEG2k-DMG.

[0688] Embodiments of the present disclosure also provide lipid compositions described according to the molar ratio between the positively charged amine groups of the amine lipid (N) and the negatively charged phosphate groups (P) of the nucleic acid to be encapsulated. This may be mathematically represented by the equation N/P. In some embodiments, an LNP composition may comprise a lipid component that comprises an amine lipid, a helper lipid, a neutral lipid, and a PEG lipid; and a nucleic acid component, wherein the N/P ratio is about 3 to 10. In some embodiments, an LNP composition may comprise a lipid component that comprises an amine lipid, a helper lipid, and a PEG lipid; and a nucleic acid component, wherein the N/P ratio is about 3 to 10. In some embodiments, an LNP composition may comprise a lipid component that comprises an amine lipid, a helper lipid, a neutral lipid, and a helper lipid; and an RNA component, wherein the N/P ratio is about 3 to 10. In some embodiments, an LNP composition may comprise a lipid component that comprises an amine lipid, a helper lipid, and a PEG lipid; and an RNA component, wherein the N/P ratio is about 3 to 10. In one embodiment, the N/P ratio may be about 5 to 7. In one embodiment, the N/P ration may be about 3 to 7. In one embodiment, the N/P ratio may be about 4.5 to 8. In one embodiment, the N/P ratio may be about 6. In one embodiment, the N/P ratio may be 6±1. In one embodiment, the N/P ratio may be 6±0.5. In some embodiments, the N/P ratio will be ±30%, ±25%, ±20%, ±15%, ±10%, ±5%, or ±2.5% of the target N/P ratio. In certain embodiments, LNP inter-lot variability will be less than 15%, less than 10% or less than 5%.

[0689] In some embodiments, the RNA component may comprise a nucleic acid, such as a nucleic acid disclosed herein, e.g., encoding a Cas nuclease. In one embodiment, RNA component may comprise a Cas9 mRNA. In some compositions comprising a nucleic acid encoding a Cas nuclease, the LNP further comprises a gRNA nucleic acid, such as a gRNA. In some embodiments, the RNA component comprises a Cas nuclease mRNA and a gRNA. In some embodiments, the RNA component comprises a Class 2 Cas nuclease mRNA and a gRNA. In any of the foregoing embodiments, the gRNA may be an sgRNA described herein, such as a chemically modified sgRNA described herein.

[0690] In certain embodiments, an LNP composition may comprise a nucleic acid disclosed herein, e.g., encoding a Cas nuclease, such as a Class 2 Cas nuclease, a gRNA, an amine lipid, a helper lipid, a neutral lipid, and a PEG lipid. In certain LNP compositions, the helper lipid is cholesterol; the neutral lipid is DSPC; and/or the PEG lipid is PEG2k-DMG or PEG2k-C11. In specific compositions, the amine lipid is selected from Lipid A and its equivalents, such as an acetal analog of Lipid A. In one embodiment, the lipid component of the LNP composition consists of an amine lipid, a helper lipid, a neutral lipid, and a PEG lipid. In one embodiment, the lipid component of the LNP composition consists of an amine lipid, a helper lipid, and a PEG lipid. In certain compositions comprising an mRNA encoding a Cas nuclease and a gRNA, the helper lipid is cholesterol. In some compositions comprising an mRNA encoding a Cas nuclease and a gRNA, the neutral lipid is DSPC. Certain compositions comprising an mRNA encoding a Cas nuclease and a gRNA comprise less than about 1 mol-% neutral lipid, e.g. neutral phospholipid. Certain compositions comprising an mRNA encoding a Cas nuclease and a gRNA comprise less than about 0.5 mol-% neutral lipid, e.g. neutral phospholipid. In certain compositions, the LNP does not comprise a neutral lipid, e.g., neutral phospholipid. In additional embodiments comprising an mRNA encoding a Cas nuclease and a gRNA, the PEG lipid is PEG2k-DMG or PEG2k-C11. In certain embodiments, the amine lipid is selected from Lipid A and its equivalents, such as acetal analogs of Lipid A.

[0691] In one embodiment, an LNP composition may comprise an sgRNA. In one embodiment, an LNP composition may comprise a Cas9 sgRNA. In one embodiment, an LNP composition may comprise a Cpf1 sgRNA. In some compositions comprising an sgRNA, the LNP includes an amine lipid, a helper lipid, a neutral lipid, and a PEG lipid. In certain compositions comprising an sgRNA, the helper lipid is cholesterol. In other compositions comprising an sgRNA, the neutral lipid is DSPC. In additional embodiments comprising an sgRNA, the PEG lipid is PEG2k-DMG or PEG2k-C11. In certain embodiments, the amine lipid is selected from Lipid A and its equivalents, such as acetal analogs of Lipid A.

[0692] In certain embodiments, the LNP compositions include a Cas nuclease mRNA, such as a Class 2 Cas mRNA and at least one gRNA. In certain embodiments, the LNP composition includes a ratio of gRNA to Cas nuclease mRNA, such as Class 2 Cas nuclease mRNA from about 25:1 to about 1:25. In certain embodiments, the LNP formulation includes a ratio of gRNA to Cas nuclease mRNA, such as Class 2 Cas nuclease mRNA from about 10:1 to about 1:10. In certain embodiments, the LNP formulation includes a ratio of gRNA to Cas nuclease mRNA, such as Class 2 Cas nuclease mRNA from about 8:1 to about 1:8. As measured herein, the ratios are by weight. In some embodiments, the LNP formulation includes a ratio of gRNA to Cas nuclease mRNA, such as Class 2 Cas mRNA from about 5:1 to about 1:5. In some embodiments, ratio range is about 3:1 to 1:3, about 2:1 to 1:2, about 5:1 to 1:2, about 5:1 to 1:1, about 3:1 to 1:2, about 3:1 to 1:1, about 3:1, about 2:1 to 1:1. In some embodiments, the gRNA to mRNA ratio is about 3:1 or about 2:1 In some embodiments the ratio of gRNA to Cas nuclease mRNA, such as Class 2 Cas nuclease is about 1:1. The ratio may be about 25:1, 10:1, 5:1, 3:1, 1:1, 1:3, 1:5, 1:10, or 1:25.

[0693] In some embodiments, LNPs are formed by mixing an aqueous RNA solution with an organic solvent-based lipid solution, e.g., 100% ethanol. Suitable solutions or solvents include or may contain: water, PBS, Tris buffer, NaCl, citrate buffer, ethanol, chloroform, diethylether, cyclohexane, tetrahydrofuran, methanol, isopropanol. A pharmaceutically acceptable buffer, e.g., for in vivo administration of LNPs, may be used. In certain embodiments, a buffer is used to maintain the pH of the composition comprising LNPs at or above pH 6.5. In certain embodiments, a buffer is used to maintain the pH of the composition comprising LNPs at or above pH 7.0. In certain embodiments, the composition has a pH ranging from about 7.2 to about 7.7. In additional embodiments, the composition has a pH ranging from about 7.3 to about 7.7 or ranging from about 7.4 to about 7.6. In further embodiments, the composition has a pH of about 7.2, 7.3, 7.4, 7.5, 7.6, or 7.7. The pH of a composition may be measured with a micro pH probe. In certain embodiments, a cryoprotectant is included in the composition. Non-limiting examples of cryoprotectants include sucrose, trehalose, glycerol, DMSO, and ethylene glycol. Exemplary compositions may include up to 10% cryoprotectant, such as, for example, sucrose. In certain embodiments, the LNP composition may include about 1, 2, 3, 4, 5, 6, 7, 8, 9, or 10% cryoprotectant. In certain embodiments, the LNP composition may include about 1, 2, 3, 4, 5, 6, 7, 8, 9, or 10% sucrose. In some embodiments, the LNP composition may include a buffer. In some embodiments, the buffer may comprise a phosphate buffer (PBS), a Tris buffer, a citrate buffer, and mixtures thereof. In certain exemplary embodiments, the buffer comprises NaCl. In certain embodiments, NaCl is omitted. Exemplary amounts of NaCl may range from about 20 mM to about 45 mM. Exemplary amounts of NaCl may range from about 40 mM to about 50 mM. In some embodiments, the amount of NaCl is about 45 mM. In some embodiments, the buffer is a Tris buffer. Exemplary amounts of Tris may range from about 20 mM to about 60 mM. Exemplary amounts of Tris may range from about 40 mM to about 60 mM. In some embodiments, the amount of Tris is about 50 mM. In some embodiments, the buffer comprises NaCl and Tris. Certain exemplary embodiments of the LNP compositions contain 5% sucrose and 45 mM NaCl in Tris buffer. In other exemplary embodiments, compositions contain sucrose in an amount of about 5% w/v, about 45 mM NaCl, and about 50 mM Tris at pH 7.5. The salt, buffer, and cryoprotectant amounts may be varied such that the osmolality of the overall formulation is maintained. For example, the final osmolality may be maintained at less than 450 mOsm/L. In further embodiments, the osmolality is between 350 and 250 mOsm/L. Certain embodiments have a final osmolality of 300+/−20 mOsm/L.

[0694] In some embodiments, microfluidic mixing, T-mixing, or cross-mixing is used. In certain aspects, flow rates, junction size, junction geometry, junction shape, tube diameter, solutions, and/or RNA and lipid concentrations may be varied. LNPs or LNP compositions may be concentrated or purified, e.g., via dialysis, tangential flow filtration, or chromatography. The LNPs may be stored as a suspension, an emulsion, or a lyophilized powder, for example. In some embodiments, an LNP composition is stored at 2-8° C., in certain aspects, the LNP compositions are stored at room temperature. In additional embodiments, an LNP composition is stored frozen, for example at −20° C. or −80° C. In other embodiments, an LNP composition is stored at a temperature ranging from about 0° C. to about −80° C. Frozen LNP compositions may be thawed before use, for example on ice, at room temperature, or at 25° C.

[0695] The LNPs may be, e.g., microspheres (including unilamellar and multilamellar vesicles, e.g., “liposomes”—lamellar phase lipid bilayers that, in some embodiments, are substantially spherical—and, in more particular embodiments, can comprise an aqueous core, e.g., comprising a substantial portion of RNA molecules), a dispersed phase in an emulsion, micelles, or an internal phase in a suspension.

[0696] Moreover, the LNP compositions are biodegradable, in that they do not accumulate to cytotoxic levels in vivo at a therapeutically effective dose. In some embodiments, the LNP compositions do not cause an innate immune response that leads to substantial adverse effects at a therapeutic dose level. In some embodiments, the LNP compositions provided herein do not cause toxicity at a therapeutic dose level.

[0697] In some embodiments, the pdi may range from about 0.005 to about 0.75. In some embodiments, the pdi may range from about 0.01 to about 0.5. In some embodiments, the pdi may range from about zero to about 0.4. In some embodiments, the pdi may range from about zero to about 0.35. In some embodiments, the pdi may range from about zero to about 0.35. In some embodiments, the pdi may range from about zero to about 0.3. In some embodiments, the pdi may range from about zero to about 0.25. In some embodiments, the pdi may range from about zero to about 0.2. In some embodiments, the pdi may be less than about 0.08, 0.1, 0.15, 0.2, or 0.4.

[0698] The LNPs disclosed herein have a size (e.g., Z-average diameter) of about 1 to about 250 nm. In some embodiments, the LNPs have a size of about 10 to about 200 nm. In further embodiments, the LNPs have a size of about 20 to about 150 nm. In some embodiments, the LNPs have a size of about 50 to about 150 nm. In some embodiments, the LNPs have a size of about 50 to about 100 nm. In some embodiments, the LNPs have a size of about 50 to about 120 nm. In some embodiments, the LNPs have a size of about 60 to about 100 nm. In some embodiments, the LNPs have a size of about 75 to about 150 nm. In some embodiments, the LNPs have a size of about 75 to about 120 nm. In some embodiments, the LNPs have a size of about 75 to about 100 nm. Unless indicated otherwise, all sizes referred to herein are the average sizes (diameters) of the fully formed nanoparticles, as measured by dynamic light scattering on a Malvern Zetasizer. The nanoparticle sample is diluted in phosphate buffered saline (PBS) so that the count rate is approximately 200-400 kcps. The data is presented as a weighted-average of the intensity measure (Z-average diameter).

[0699] In some embodiments, the LNPs are formed with an average encapsulation efficiency ranging from about 50% to about 100%. In some embodiments, the LNPs are formed with an average encapsulation efficiency ranging from about 50% to about 70%. In some embodiments, the LNPs are formed with an average encapsulation efficiency ranging from about 70% to about 90%. In some embodiments, the LNPs are formed with an average encapsulation efficiency ranging from about 90% to about 100%. In some embodiments, the LNPs are formed with an average encapsulation efficiency ranging from about 75% to about 95%.

[0700] In some embodiments, the LNPs are formed with an average molecular weight ranging from about 1.00E+05 g/mol to about 1.00E+10 g/mol. In some embodiments, the LNPs are formed with an average molecular weight ranging from about 5.00E+05 g/mol to about 7.00E+07 g/mol. In some embodiments, the LNPs are formed with an average molecular weight ranging from about 1.00E+06 g/mol to about 1.00E+10 g/mol. In some embodiments, the LNPs are formed with an average molecular weight ranging from about 1.00E+07 g/mol to about 1.00E+09 g/mol. In some embodiments, the LNPs are formed with an average molecular weight ranging from about 5.00E+06 g/mol to about 5.00E+09 g/mol.

[0701] In some embodiments, the polydispersity (Mw/Mn; the ratio of the weight averaged molar mass (Mw) to the number averaged molar mass (Mn)) may range from about 1.000 to about 2.000. In some embodiments, the Mw/Mn may range from about 1.00 to about 1.500. In some embodiments, the Mw/Mn may range from about 1.020 to about 1.400. In some embodiments, the Mw/Mn may range from about 1.010 to about 1.100. In some embodiments, the Mw/Mn may range from about 1.100 to about 1.350.

[0702] Dynamic Light Scattering (“DLS”) can be used to characterize the polydispersity index (“pdi”) and size of the LNPs of the present disclosure. DLS measures the scattering of light that results from subjecting a sample to a light source. PDI, as determined from DLS measurements, represents the distribution of particle size (around the mean particle size) in a population, with a perfectly uniform population having a PDI of zero. In some embodiments, the pdi may range from 0.005 to 0.75. In some embodiments, the pdi may range from 0.01 to 0.5. In some embodiments, the pdi may range from 0.02 to 0.4. In some embodiments, the pdi may range from 0.03 to 0.35. In some embodiments, the pdi may range from 0.1 to 0.35.

[0703] In some embodiments, LNPs disclosed herein have a size of 1 to 250 nm. In some embodiments, the LNPs have a size of 10 to 200 nm. In further embodiments, the LNPs have a size of 20 to 150 nm. In some embodiments, the LNPs have a size of 50 to 150 nm. In some embodiments, the LNPs have a size of 50 to 100 nm. In some embodiments, the LNPs have a size of 50 to 120 nm. In some embodiments, the LNPs have a size of 75 to 150 nm. In some embodiments, the LNPs have a size of 30 to 200 nm. Unless indicated otherwise, all sizes referred to herein are the average sizes (diameters) of the fully formed nanoparticles, as measured by dynamic light scattering on a Malvern Zetasizer. The nanoparticle sample is diluted in phosphate buffered saline (PBS) so that the count rate is approximately 200-400 kcts. The data is presented as a weighted-average of the intensity measure. In some embodiments, the LNPs are formed with an average encapsulation efficiency ranging from 50% to 100%. In some embodiments, the LNPs are formed with an average encapsulation efficiency ranging from 50% to 70%. In some embodiments, the LNPs are formed with an average encapsulation efficiency ranging from 70% to 90%. In some embodiments, the LNPs are formed with an average encapsulation efficiency ranging from 90% to 100%. In some embodiments, the LNPs are formed with an average encapsulation efficiency ranging from 75% to 95%.

[0704] In some embodiments, LNPs associated with the gRNAs disclosed herein are for use in preparing a medicament for treating ATTR. In some embodiments, LNPs associated with the gRNAs disclosed herein are for use in preparing a medicament for reducing or preventing accumulation and aggregation of TTR in amyloids or amyloid fibrils in subjects having ATTR. In some embodiments, LNPs associated with the gRNAs disclosed herein are for use in preparing a medicament for reducing serum TTR concentration. In some embodiments, LNPs associated with the gRNAs disclosed herein are for use in treating ATTR in a subject, such as a mammal, e.g., a primate such as a human. In some embodiments, LNPs associated with the gRNAs disclosed herein are for use in reducing or preventing accumulation and aggregation of TTR in amyloids or amyloid fibrils in subjects having ATTR, such as a mammal, e.g., a primate such as a human. In some embodiments, LNPs associated with the gRNAs disclosed herein are for use in reducing serum TTR concentration in a subject, such as a mammal, e.g., a primate such as a human. In any of the foregoing embodiments, the LNPs may be associated with the gRNAs disclosed herein and nucleic acids (e.g., mRNA) encoding an RNA-guided DNA binding agent (e.g. Cas9, Spy Cas9) disclosed herein.

[0705] Electroporation is also a well-known means for delivery of cargo, and any electroporation methodology may be used for delivery of any one of the gRNAs disclosed herein. In some embodiments, electroporation may be used to deliver any one of the gRNAs disclosed herein, and optionally an RNA-guided DNA nuclease such as Cas9 or a nucleic acid encoding an RNA-guided DNA nuclease such as Cas9.

[0706] In some embodiments, the invention comprises a method for delivering any one of the gRNAs disclosed herein to an ex vivo cell, wherein the gRNA is associated with an LNP or not associated with an LNP. In some embodiments, the gRNA/LNP or gRNA is also optionally associated with an RNA-guided DNA nuclease such as Cas9 or a nucleic acid encoding an RNA-guided DNA nuclease, e.g., a nucleic acid (e.g., mRNA) encoding an RNA-guided DNA binding agent (e.g. Cas9, Spy Cas9) disclosed herein.

[0707] In certain embodiments, the invention comprises DNA or RNA vectors encoding any of the guide RNAs comprising any one or more of the guide sequences described herein. In some embodiments, in addition to guide RNA sequences, the vectors further comprise nucleic acids that do not encode guide RNAs. Nucleic acids that do not encode guide RNA include, but are not limited to, promoters, enhancers, regulatory sequences, and optionally nucleic acids described herein encoding an RNA-guided DNA nuclease, which can be a nuclease such as Cas9. In some embodiments, the vector comprises one or more nucleotide sequence(s) encoding a crRNA, a trRNA, or a crRNA and trRNA. In some embodiments, the vector comprises one or more nucleotide sequence(s) encoding a sgRNA, and optionally a nucleic acid described herein encoding an RNA-guided DNA nuclease, which can be a Cas nuclease, such as Cas9 or Cpf1. In some embodiments, the vector comprises one or more nucleotide sequence(s) encoding a crRNA, a trRNA, and optionally a nucleic acid described herein encoding an RNA-guided DNA nuclease, which can be a Cas protein, such as, Cas9. In one embodiment, the Cas9 is from Streptococcus pyogenes (i.e., Spy Cas9). In some embodiments, the nucleotide sequence encoding the crRNA, trRNA, or crRNA and trRNA (which may be a sgRNA) comprises or consists of a guide sequence flanked by all or a portion of a repeat sequence from a naturally-occurring CRISPR/Cas system. The nucleic acid comprising or consisting of the crRNA, trRNA, or crRNA and trRNA may further comprise a vector sequence wherein the vector sequence comprises or consists of nucleic acids that are not naturally found together with the crRNA, trRNA, or crRNA and trRNA.

[0708] In some embodiments, the crRNA and the trRNA are encoded by non-contiguous nucleic acids within one vector. In other embodiments, the crRNA and the trRNA may be encoded by a contiguous nucleic acid. In some embodiments, the crRNA and the trRNA are encoded by opposite strands of a single nucleic acid. In other embodiments, the crRNA and the trRNA are encoded by the same strand of a single nucleic acid.

[0709] In some embodiments, the vector may be circular. In other embodiments, the vector may be linear. In some embodiments, the vector may be enclosed in a lipid nanoparticle, liposome, non-lipid nanoparticle, or viral capsid. Non-limiting exemplary vectors include plasmids, phagemids, cosmids, artificial chromosomes, minichromosomes, transposons, viral vectors, and expression vectors.

[0710] In some embodiments, the vector may be a viral vector. In some embodiments, the viral vector may be genetically modified from its wild type counterpart. For example, the viral vector may comprise an insertion, deletion, or substitution of one or more nucleotides to facilitate cloning or such that one or more properties of the vector is changed. Such properties may include packaging capacity, transduction efficiency, immunogenicity, genome integration, replication, transcription, and translation. In some embodiments, a portion of the viral genome may be deleted such that the virus is capable of packaging exogenous sequences having a larger size. In some embodiments, the viral vector may have an enhanced transduction efficiency. In some embodiments, the immune response induced by the virus in a host may be reduced. In some embodiments, viral genes (such as, e.g., integrase) that promote integration of the viral sequence into a host genome may be mutated such that the virus becomes non-integrating. In some embodiments, the viral vector may be replication defective. In some embodiments, the viral vector may comprise exogenous transcriptional or translational control sequences to drive expression of coding sequences on the vector. In some embodiments, the virus may be helper-dependent. For example, the virus may need one or more helper virus to supply viral components (such as, e.g., viral proteins) required to amplify and package the vectors into viral particles. In such a case, one or more helper components, including one or more vectors encoding the viral components, may be introduced into a host cell along with the vector system described herein. In other embodiments, the virus may be helper-free. For example, the virus may be capable of amplifying and packaging the vectors without any helper virus. In some embodiments, the vector system described herein may also encode the viral components required for virus amplification and packaging.

[0711] Non-limiting exemplary viral vectors include adeno-associated virus (AAV) vector, lentivirus vectors, adenovirus vectors, helper dependent adenoviral vectors (HDAd), herpes simplex virus (HSV-1) vectors, bacteriophage T4, baculovirus vectors, and retrovirus vectors. In some embodiments, the viral vector may be an AAV vector. In some embodiments, the viral vector is AAV2, AAV3, AAV3B, AAVS, AAV6, AAV6.2, AAV7, AAVrh.64R1, AAVhu.37, AAVrh.8, AAVrh.32.33, AAV8, AAV9, AAVrh10, or AAVLK03. In other embodiments, the viral vector may a lentivirus vector.

[0712] In some embodiments, the lentivirus may be non-integrating. In some embodiments, the viral vector may be an adenovirus vector. In some embodiments, the adenovirus may be a high-cloning capacity or “gutless” adenovirus, where all coding viral regions apart from the 5′ and 3′ inverted terminal repeats (ITRs) and the packaging signal (‘I’) are deleted from the virus to increase its packaging capacity. In yet other embodiments, the viral vector may be an HSV-1 vector. In some embodiments, the HSV-1-based vector is helper dependent, and in other embodiments it is helper independent. For example, an amplicon vector that retains only the packaging sequence requires a helper virus with structural components for packaging, while a 30 kb-deleted HSV-1 vector that removes non-essential viral functions does not require helper virus. In additional embodiments, the viral vector may be bacteriophage T4. In some embodiments, the bacteriophage T4 may be able to package any linear or circular DNA or RNA molecules when the head of the virus is emptied. In further embodiments, the viral vector may be a baculovirus vector. In yet further embodiments, the viral vector may be a retrovirus vector. In embodiments using AAV or lentiviral vectors, which have smaller cloning capacity, it may be necessary to use more than one vector to deliver all the components of a vector system as disclosed herein. For example, one AAV vector may contain sequences encoding an RNA-guided DNA nuclease such as a Cas nuclease, while a second AAV vector may contain one or more guide sequences.

[0713] In some embodiments, the vector may be capable of driving expression of one or more coding sequences in a cell. In some embodiments, the cell may be a prokaryotic cell, such as, e.g., a bacterial cell. In some embodiments, the cell may be a eukaryotic cell, such as, e.g., a yeast, plant, insect, or mammalian cell. In some embodiments, the eukaryotic cell may be a mammalian cell. In some embodiments, the eukaryotic cell may be a rodent cell. In some embodiments, the eukaryotic cell may be a human cell. Suitable promoters to drive expression in different types of cells are known in the art. In some embodiments, the promoter may be wild type. In other embodiments, the promoter may be modified for more efficient or efficacious expression. In yet other embodiments, the promoter may be truncated yet retain its function. For example, the promoter may have a normal size or a reduced size that is suitable for proper packaging of the vector into a virus.

[0714] In some embodiments, the promoter may be constitutive, inducible, or tissue-specific. In some embodiments, the promoter may be a constitutive promoter. Non-limiting exemplary constitutive promoters include cytomegalovirus immediate early promoter (CMV), simian virus (SV40) promoter, adenovirus major late (MLP) promoter, Rous sarcoma virus (RSV) promoter, mouse mammary tumor virus (MMTV) promoter, phosphoglycerate kinase (PGK) promoter, elongation factor-alpha (EF1a) promoter, ubiquitin promoters, actin promoters, tubulin promoters, immunoglobulin promoters, a functional fragment thereof, or a combination of any of the foregoing. In some embodiments, the promoter may be a CMV promoter. In some embodiments, the promoter may be a truncated CMV promoter. In other embodiments, the promoter may be an EF1a promoter. In some embodiments, the promoter may be an inducible promoter. Non-limiting exemplary inducible promoters include those inducible by heat shock, light, chemicals, peptides, metals, steroids, antibiotics, or alcohol. In some embodiments, the inducible promoter may be one that has a low basal (non-induced) expression level, such as, e.g., the Tet-On® promoter (Clontech).

[0715] In some embodiments, the promoter may be a tissue-specific promoter, e.g., a promoter specific for expression in the liver.

[0716] The vector may further comprise a nucleotide sequence encoding the guide RNA described herein. In some embodiments, the vector comprises one copy of the guide RNA. In other embodiments, the vector comprises more than one copy of the guide RNA. In embodiments with more than one guide RNA, the guide RNAs may be non-identical such that they target different target sequences, or may be identical in that they target the same target sequence. In some embodiments where the vectors comprise more than one guide RNA, each guide RNA may have other different properties, such as activity or stability within a complex with an RNA-guided DNA nuclease, such as a Cas RNP complex. In some embodiments, the nucleotide sequence encoding the guide RNA may be operably linked to at least one transcriptional or translational control sequence, such as a promoter, a 3′ UTR, or a 5′ UTR. In one embodiment, the promoter may be a tRNA promoter, e.g., tRNA^{Lys3}, or a tRNA chimera. See Mefferd et al., RNA. 2015 21:1683-9; Scherer et al., Nucleic Acids Res. 2007 35: 2620-2628. In some embodiments, the promoter may be recognized by RNA polymerase III (Pol III). Non-limiting examples of Pol III promoters include U6 and H1 promoters. In some embodiments, the nucleotide sequence encoding the guide RNA may be operably linked to a mouse or human U6 promoter. In other embodiments, the nucleotide sequence encoding the guide RNA may be operably linked to a mouse or human H1 promoter. In embodiments with more than one guide RNA, the promoters used to drive expression may be the same or different. In some embodiments, the nucleotide encoding the crRNA of the guide RNA and the nucleotide encoding the trRNA of the guide RNA may be provided on the same vector. In some embodiments, the nucleotide encoding the crRNA and the nucleotide encoding the trRNA may be driven by the same promoter. In some embodiments, the crRNA and trRNA may be transcribed into a single transcript. For example, the crRNA and trRNA may be processed from the single transcript to form a double-molecule guide RNA. Alternatively, the crRNA and trRNA may be transcribed into a single-molecule guide RNA (sgRNA). In other embodiments, the crRNA and the trRNA may be driven by their corresponding promoters on the same vector. In yet other embodiments, the crRNA and the trRNA may be encoded by different vectors.

[0717] In some embodiments, the vector may optionally further comprise a nucleotide sequence encoding an RNA-guided DNA nuclease such as a nuclease described herein. In some embodiments, the nuclease encoded by the vector may be a Cas protein. In some embodiments, the vector system may comprise one copy of the nucleotide sequence encoding the nuclease. In other embodiments, the vector system may comprise more than one copy of the nucleotide sequence encoding the nuclease. In some embodiments, the nucleotide sequence encoding the nuclease may be operably linked to at least one transcriptional or translational control sequence. In some embodiments, the nucleotide sequence encoding the nuclease may be operably linked to at least one promoter.

[0718] In some embodiments, the nucleotide sequence encoding the guide RNA may be located on the same vector comprising the nucleotide sequence encoding an RNA-guided DNA nuclease such as a Cas nuclease. In some embodiments, expression of the guide RNA and of the RNA-guided DNA nuclease such as a Cas protein may be driven by their own corresponding promoters. In some embodiments, expression of the guide RNA may be driven by the same promoter that drives expression of the RNA-guided DNA nuclease such as a Cas protein. In some embodiments, the guide RNA and the RNA-guided DNA nuclease such as a Cas protein transcript may be contained within a single transcript. For example, the guide RNA may be within an untranslated region (UTR) of the RNA-guided DNA nuclease such as a Cas protein transcript. In some embodiments, the guide RNA may be within the 5′ UTR of the transcript. In other embodiments, the guide RNA may be within the 3′ UTR of the transcript. In some embodiments, the intracellular half-life of the transcript may be reduced by containing the guide RNA within its 3′ UTR and thereby shortening the length of its 3′ UTR. In additional embodiments, the guide RNA may be within an intron of the transcript. In some embodiments, suitable splice sites may be added at the intron within which the guide RNA is located such that the guide RNA is properly spliced out of the transcript. In some embodiments, expression of the RNA-guided DNA nuclease such as a Cas protein and the guide RNA from the same vector in close temporal proximity may facilitate more efficient formation of the CRISPR RNP complex.

[0719] In some embodiments, the compositions comprise a vector system. In some embodiments, the vector system may comprise one single vector. In other embodiments, the vector system may comprise two vectors. In additional embodiments, the vector system may comprise three vectors. When different guide RNAs are used for multiplexing, or when multiple copies of the guide RNA are used, the vector system may comprise more than three vectors.

[0720] In some embodiments, the vector system may comprise inducible promoters to start expression only after it is delivered to a target cell. Non-limiting exemplary inducible promoters include those inducible by heat shock, light, chemicals, peptides, metals, steroids, antibiotics, or alcohol. In some embodiments, the inducible promoter may be one that has a low basal (non-induced) expression level, such as, e.g., the Tet-On® promoter (Clontech).

[0721] In additional embodiments, the vector system may comprise tissue-specific promoters to start expression only after it is delivered into a specific tissue.

[0722] The vector may be delivered by liposome, a nanoparticle, an exosome, or a microvesicle. The vector may also be delivered by a lipid nanoparticle (LNP); see e.g., WO2017/173054, published Oct. 5, 2017, entitled “LIPID NANOPARTICLE FORMULATIONS FOR CRISPR/CAS COMPONENTS,” and WO2019067992A1 published Apr. 4, 2019, entitled “FORMULATIONS,” the contents of each of which are hereby incorporated by reference in their entirety. Any of the LNPs and LNP formulations described herein are suitable for delivery of the guides alone or together a cas nuclease or a nucleic acid encoding a cas nuclease. In some embodiments, an LNP composition is encompassed comprising: an RNA component and a lipid component, wherein the lipid component comprises an amine lipid, a neutral lipid, a helper lipid, and a stealth lipid; and wherein the N/P ratio is about 1-10.

[0723] In some instances, the lipid component comprises Lipid A or its acetal analog, cholesterol, DSPC, and PEG-DMG; and wherein the N/P ratio is about 1-10. In some embodiments, the lipid component comprises: about 40-60 mol-% amine lipid; about 5-15 mol-% neutral lipid; and about 1.5-10 mol-% PEG lipid, wherein the remainder of the lipid component is helper lipid, and wherein the N/P ratio of the LNP composition is about 3-10. In some embodiments, the lipid component comprises about 50-60 mol-% amine lipid; about 8-10 mol-% neutral lipid; and about 2.5-4 mol-% PEG lipid, wherein the remainder of the lipid component is helper lipid, and wherein the N/P ratio of the LNP composition is about 3-8. In some instances, the lipid component comprises: about 50-60 mol-% amine lipid; about 5-15 mol-% DSPC; and about 2.5-4 mol-% PEG lipid, wherein the remainder of the lipid component is cholesterol, and wherein the N/P ratio of the LNP composition is about 3-8. In some instances, the lipid component comprises: 48-53 mol-% Lipid A; about 8-10 mol-% DSPC; and 1.5-10 mol-% PEG lipid, wherein the remainder of the lipid component is cholesterol, and wherein the N/P ratio of the LNP composition is 3-8±0.2.

[0724] In some embodiments, the LNP comprises a lipid component and the lipid component comprises, consists essentially of, or consists of: about 50 mol-% amine lipid such as Lipid A; about 9 mol-% neutral lipid such as DSPC; about 3 mol-% of a stealth lipid such as a PEG lipid, such as PEG2k-DMG, and the remainder of the lipid component is helper lipid such as cholesterol, wherein the N/P ratio of the LNP composition is about 6. In some embodiments, the amine lipid is Lipid A. In some embodiments, the neutral lipid is DSPC. In some embodiments, the stealth lipid is a PEG lipid. In some embodiments, the stealth lipid is a PEG2k-DMG. In some embodiments, the helper lipid is cholesterol. In some embodiments, the LNP comprises a lipid component and the lipid component comprises: about 50 mol-% Lipid A; about 9 mol-% DSPC; about 3 mol-% of PEG2k-DMG, and the remainder of the lipid component is cholesterol wherein the N/P ratio of the LNP composition is about 6.

[0725] In some embodiments, the vector may be delivered systemically. In some embodiments, the vector may be delivered into the hepatic circulation.

[0726] This description and exemplary embodiments should not be taken as limiting. For the purposes of this specification and appended claims, unless otherwise indicated, all numbers expressing quantities, percentages, or proportions, and other numerical values used in the specification and claims, are to be understood as being modified in all instances by the term “about,” to the extent they are not already so modified. Accordingly, unless indicated to the contrary, the numerical parameters set forth in the following specification and attached claims are approximations that may vary depending upon the desired properties sought to be obtained. At the very least, and not as an attempt to limit the application of the doctrine of equivalents to the scope of the claims, each numerical parameter should at least be construed in light of the number of reported significant digits and by applying ordinary rounding techniques.

[0727] It is noted that, as used in this specification and the appended claims, the singular forms “a,” “an,” and “the,” and any singular use of any word, include plural referents unless expressly and unequivocally limited to one referent. As used herein, the term “include” and its grammatical variants are intended to be non-limiting, such that recitation of items in a list is not to the exclusion of other like items that can be substituted or added to the listed items.

### EXAMPLES

[0728] The following examples are provided to illustrate certain disclosed embodiments and are not to be construed as limiting the scope of this disclosure in any way.

### Example 1. Materials and Methods

[0729] In Vitro Transcription (“IVT”) of Nuclease mRNA

[0730] Capped and polyadenylated Streptococcus pyogenes (“Spy”) Cas9 mRNA containing N1-methyl pseudo-U was generated by in vitro transcription using a linearized plasmid DNA template and T7 RNA polymerase. Plasmid DNA containing a T7 promoter, a sequence for transcription according to SEQ ID NO: 1, 2, or another sequence disclosed herein, and a 90-100 nt poly (A/T) region was linearized by incubating at 37° C. for 2 hours with XbaI with the following conditions: 200 ng/μL plasmid, 2 U/μL XbaI (NEB), and 1× reaction buffer. The XbaI was inactivated by heating the reaction at 65° C. for 20 min. The linearized plasmid was purified from enzyme and buffer salts. The IVT reaction to generate Cas9 modified mRNA was performed by incubating at 37° C. for 1.5-4 hours in the following conditions: 50 ng/μL linearized plasmid; 2-5 mM each of GTP, ATP, CTP, and N1-methyl pseudo-UTP (Trilink); 10-25 mM ARCA (Trilink); 5 U/μL T7 RNA polymerase (NEB); 1 U/μL Murine RNase inhibitor (NEB); 0.004 U/μL Inorganic E. coli pyrophosphatase (NEB); and 1× reaction buffer. TURBO DNase (ThermoFisher) was added to a final concentration of 0.01 U/μL, and the reaction was incubated for an additional 30 minutes to remove the DNA template. The Cas9 mRNA was purified using a MegaClear Transcription Clean-up kit (ThermoFisher) or a RNeasy Maxi kit (Qiagen) per the manufacturers' protocols. Alternatively, the mRNA was purified through a precipitation protocol, which in some cases was followed by HPLC-based purification. Briefly, after the DNase digestion, mRNA is purified using LiCl precipitation, ammonium acetate precipitation and sodium acetate precipitation. For HPLC purified mRNA, after the LiCl precipitation and reconstitution, the mRNA was purified by RP-IP HPLC (see, e.g., Kariko, et al. Nucleic Acids Research, 2011, Vol. 39, No. 21 e142). The fractions chosen for pooling were combined and desalted by sodium acetate/ethanol precipitation as described above. In a further alternative method, mRNA was purified with a LiCl precipitation method followed by further purification by tangential flow filtration. RNA concentrations were determined by measuring the light absorbance at 260 nm (Nanodrop), and transcripts were analyzed by capillary electrophoresis by Bioanlayzer (Agilent).

[0731] When SEQ ID NOs: 1 and 2 are referred to below with respect to RNAs, it is understood that Ts should be replaced with Us (which were N1-methyl pseudouridines as described above). Cas9 mRNAs used in the Examples include a 5′ cap and a 3′ poly-A tail, e.g., up to 100 nts, and are identified by SEQ ID NO.

Human TTR Guide Design and Human TTR with Cynomolgus Monkey Homology Guide Design

[0732] Initial guide selection was performed in silico using a human reference genome (e.g., hg38) and user defined genomic regions of interest (e.g., TTR protein coding exons), for identifying PAMs in the regions of interest. For each identified PAM, analyses were performed and statistics reported. gRNA molecules were further selected and rank ordered based on a number of criteria (e.g., GC content, predicted on-target activity, and potential off-target activity).

[0733] A total of 68 guide RNAs were designed toward TTR (ENSG00000118271) targeting the protein coding regions within Exon 1, 2, 3 and 4. Of the total 68 guides, 33 were 100% homologous in cynomolgus monkey (“cyno”). In addition, for 10 of the human TTR guides which were not perfectly homologous in cyno, “surrogate” guides were designed and made in parallel to perfectly match the corresponding cyno target sequence. These “surrogate” or “tool” guides may be screened in cyno, e.g., to approximate the activity and function of the homologous human guide sequence. Guide sequences and corresponding genomic coordinates are provided (Table 1). All of the guide RNAs were made as dual guide RNAs, and a subset of the guide sequences were made as modified single guide RNA (Table 2). Guide ID alignment across dual guide RNA (dgRNA) IDs, modified single guide RNA (sgRNA) IDs, the number of mismatches to the cyno genome as well as the cyno exact matched IDs are provided (Table 3). Where dgRNAs are used in the experiments detailed throughout the Examples, SEQ ID NO: 270 was used.

[0734] The sgRNAs in the following examples were chemically synthesized by known methods using phosphoramidites.

Cas9 mRNA and Guide RNA Delivery In Vitro

[0735] HEK293_Cas9 cell line. The human embryonic kidney adenocarcinoma cell line HEK293 constitutively expressing Spy Cas9 (“HEK293_Cas9”) was cultured in DMEM media supplemented with 10% fetal bovine serum and 500 μg/ml G418. Cells were plated at a density of 10,000 cells/well in a 96-well plate 24 hours prior to transfection. Cells were transfected with Lipofectamine RNAiMAX (ThermoFisher, Cat. 13778150) per the manufacturer's protocol. Cells were transfected with a lipoplex containing individual crRNA (25 nM), trRNA (25 nM), Lipofectamine RNAiMAX (0.3 μL/well) and OptiMem.

[0736] HUH7 cell line. The human hepatocellular carcinoma cell line HUH7 (Japanese Collection of Research Bioresources Cell Bank, Cat. JCRB0403) was cultured in DMEM media supplemented with 10% fetal bovine serum. Cells were plated on at a density of 15,000 cells/well in a 96-well plate 20 hours prior to transfection. Cells were transfected with Lipofectamine MessengerMAX (ThermoFisher, Cat. LMRNA003) per the manufacturer's protocol. Cells were sequentially transfected with a lipoplex containing Spy Cas9 mRNA (100 ng), MessengerMAX (0.3 μL/well) and OptiMem followed by a separate lipoplex containing individual crRNA (25 nM), tracer RNA (25 nM), MessengerMAX (0.3 μL/well) and OptiMem.

[0737] HepG2 cell line. The human hepatocellular carcinoma cell line HepG2 (American Type Culture Collection, Cat. HB-8065) was cultured in DMEM media supplemented with 10% fetal bovine serum. Cells were counted and plated on Bio-coat collagen I coated 96-well plates (ThermoFisher, Cat. 877272) at a density of 10,000 cells/well in a 96-well plate 24 hours prior to transfection. Cells were transfected with Lipofectamine 2000 (ThermoFisher, Cat. 11668019) per the manufacturer's protocol. Cells were sequentially transfected with lipoplex containing Spy Cas9 mRNA (100 ng), Lipofectamine 2000 (0.2 μL/well) and OptiMem followed by a separate lipoplex containing individual crRNA (25 nM), tracer RNA (25 nM), Lipofectamine 2000 (0.2 μL/well) and OptiMem.

[0738] Primary liver hepatocytes. Primary human liver hepatocytes (PHH) and primary cynomolgus liver hepatocytes (PCH) (Gibco) were cultured per the manufacturer's protocol (Invitrogen, protocol 11.28.2012). In brief, the cells were thawed and resuspended in hepatocyte thawing medium with supplements (Gibco, Cat. CM7000) followed by centrifugation at 100 g for 10 minutes for human and 80 g for 4 minutes for cyno. The supernatant was discarded and the pelleted cells resuspended in hepatocyte plating medium plus supplement pack (Invitrogen, Cat. A1217601 and CM3000). Cells were counted and plated on Bio-coat collagen I coated 96-well plates (ThermoFisher, Cat. 877272) at a density of 33,000 cells/well for human or 60,000 cells/well for cyno (or 65,000 cells/well when assaying effects on TTR protein, described further below). Plated cells were allowed to settle and adhere for 6 or 24 hours in a tissue culture incubator at 37° C. and 5% CO₂ atmosphere. After incubation cells were checked for monolayer formation and media was replaced with hepatocyte culture medium with serum-free supplement pack (Invitrogen, Cat. A1217601 and CM4000).

[0739] Lipofectamine RNAiMax (ThermoFisher, Cat. 13778150) based transfections were conducted as per the manufacturer's protocol. Cells were sequentially transfected with a lipoplex containing Spy Cas9 mRNA (100 ng), Lipofectamine RNAiMax (0.4 μL/well) and OptiMem followed by a separate lipoplex containing crRNA (25 nM) and tracer RNA (25 nM) or sgRNA (25 nM), Lipofectamine RNAiMax (0.4 μL/well) and OptiMem.

[0740] Ribonucleotide formation was performed prior to electroporation or transfection of Spy Cas9 protein loaded with guide RNAs (RNPs) onto cells. For dual guide (dgRNAs), individual crRNA and trRNA was pre-annealed by mixing equivalent amounts of reagent and incubating at 95° C. for 2 min and cooling to room temperature. Single guide (sgRNAs) were boiled at 95° C. for 2 min and cooling to room temperature. The boiled dgRNA or sgRNA was incubated with Spy Cas9 protein in Optimem for 10 minutes at room temperature to form a ribonucleoprotein (RNP) complex.

[0741] For RNP electroporation into primary human and cyno hepatocytes, the cells are thawed and resuspended in Lonza electroporation Primary Cell P3 buffer at a concentration of 2500 cells per μL for human hepatocytes and 3500 cells per μL for cyno hepatocytes. A volume of 20 μL of resuspended cells and 5 μL of RNP are mixed together per guide. 20 μL of the mixture is placed into a Lonza electroporation plate. The cells were electroporated using the Lonza nucleofector with the preset protocol EX-147. Post electroporation, the cells are transferred into a Biocoat plate containing pre-warmed maintenance media and placed in a tissue culture incubator at 37° C. and 5% CO₂.

[0742] For RNP lipoplex transfections, cells were transfected with Lipofectamine RNAiMAX (ThermoFisher, Cat. 13778150) per the manufacturer's protocol. Cells were transfected with an RNP containing Spy Cas9 (10 nM), individual guide (10 nM), tracer RNA (10 nM), Lipofectamine RNAiMAX (1.0 μL/well) and OptiMem. RNP formation was performed as described above.

[0743] LNPs were formed either by microfluidic mixing of the lipid and RNA solutions using a Precision Nanosystems NanoAssemblr™ Benchtop Instrument, per the manufacturer's protocol, or cross-flow mixing.

### LNP Formulation—NanoAssemblr

[0744] In general, the lipid nanoparticle components were dissolved in 100% ethanol with the lipid component of various molar ratios. The RNA cargos were dissolved in 25 mM citrate, 100 mM NaCl, pH 5.0, resulting in a concentration of RNA cargo of approximately 0.45 mg/mL. The LNPs were formulated with a lipid amine to RNA phosphate (N:P) molar ratio of about 4.5 or about 6, with the ratio of mRNA to gRNA at 1:1 by weight.

[0745] The LNPs were formed by microfluidic mixing of the lipid and RNA solutions using a Precision Nanosystems NanoAssemblr™ Benchtop Instrument, according to the manufacturer's protocol. A 2:1 ratio of aqueous to organic solvent was maintained during mixing using differential flow rates. After mixing, the LNPs were collected, diluted in water (approximately 1:1 v/v), held for 1 hour at room temperature, and further diluted with water (approximately 1:1 v/v) before final buffer exchange. The final buffer exchange into 50 mM Tris, 45 mM NaCl, 5% (w/v) sucrose, pH 7.5 (TSS) was completed with PD-10 desalting columns (GE). If required, formulations were concentrated by centrifugation with Amicon 100 kDa centrifugal filters (Millipore). The resulting mixture was then filtered using a 0.2 μm sterile filter. The final LNP was stored at −80° C. until further use.

### LNP Formulation—Cross-Flow

[0746] For LNPs prepared using the cross-flow technique, the LNPs were formed by impinging jet mixing of the lipid in ethanol with two volumes of RNA solutions and one volume of water. The lipid in ethanol is mixed through a mixing cross with the two volumes of RNA solution. A fourth stream of water is mixed with the outlet stream of the cross through an inline tee. (See WO2016010840 FIG. 2.) The LNPs were held for 1 hour at room temperature, and further diluted with water (approximately 1:1 v/v). Diluted LNPs were concentrated using tangential flow filtration on a flat sheet cartridge (Sartorius, 100 kD MWCO) and then buffer exchanged by diafiltration into 50 mM Tris, 45 mM NaCl, 5% (w/v) sucrose, pH 7.5 (TSS). Alternatively, the final buffer exchange into TSS was completed with PD-10 desalting columns (GE). If required, formulations were concentrated by centrifugation with Amicon 100 kDa centrifugal filters (Millipore). The resulting mixture was then filtered using a 0.2 μm sterile filter. The final LNP was stored at 4° C. or −80° C. until further use.

### Formulation Analytics

[0747] Dynamic Light Scattering (“DLS”) is used to characterize the polydispersity index (“pdi”) and size of the LNPs of the present disclosure. DLS measures the scattering of light that results from subjecting a sample to a light source. PDI, as determined from DLS measurements, represents the distribution of particle size (around the mean particle size) in a population, with a perfectly uniform population having a PDI of zero. Average particle size and polydispersity are measured by dynamic light scattering (DLS) using a Malvern Zetasizer DLS instrument. LNP samples were diluted 30× in PBS prior to being measured by DLS. Z-average diameter which is an intensity based measurement of average particle size was reported along with number average diameter and pdi. A Malvern Zetasizer instrument is also used to measure the zeta potential of the LNP. Samples are diluted 1:17 (50 uL into 800 uL) in 0.1×PBS, pH 7.4 prior to measurement.

[0748] Electrophoretic light scattering is used to characterize the surface charge of the LNP at a specified pH. The surface charge, or the zeta potential, is a measure of the magnitude of electrostatic repulsion/attraction between particles in the LNP suspension.

[0749] Asymmetric-Flow Field Flow Fractionation—Multi-Angle Light Scattering (AF4-MALS) is used to separate particles in the composition by hydrodynamic radius and then measure the molecular weights, hydrodynamic radii and root mean square radii of the fractionated particles. This allows the ability to assess molecular weight and size distributions as well as secondary characteristics such as the Burchard-Stockmeyer Plot (ratio of root mean square (“rms”) radius to hydrodynamic radius over time suggesting the internal core density of a particle) and the rms conformation plot (log of rms radius vs log of molecular weight where the slope of the resulting linear fit gives a degree of compactness vs elongation).

[0750] Nanoparticle tracking analysis (NTA, Malvern Nanosight) can be used to determine particle size distribution as well as particle concentration. LNP samples are diluted appropriately and injected onto a microscope slide. A camera records the scattered light as the particles are slowly infused through field of view. After the movie is captured, the Nanoparticle Tracking Analysis processes the movie by tracking pixels and calculating a diffusion coefficient. This diffusion coefficient can be translated into the hydrodynamic radius of the particle. The instrument also counts the number of individual particles counted in the analysis to give particle concentration.

[0751] Cryo-electron microscopy (“cryo-EM”) can be used to determine the particle size, morphology, and structural characteristics of an LNP.

[0752] Lipid compositional analysis of the LNPs can be determined from liquid chromatography followed by charged aerosol detection (LC-CAD). This analysis can provide a comparison of the actual lipid content versus the theoretical lipid content.

[0753] LNP compositions are analyzed for average particle size, polydispersity index (pdi), total RNA content, encapsulation efficiency of RNA, and zeta potential. LNP compositions may be further characterized by lipid analysis, AF4-MALS, NTA, and/or cryo-EM. Average particle size and polydispersity are measured by dynamic light scattering (DLS) using a Malvern Zetasizer DLS instrument. LNP samples were diluted with PBS buffer prior to being measured by DLS. Z-average diameter which is an intensity-based measurement of average particle size is reported along with number average diameter and pdi. A Malvern Zetasizer instrument is also used to measure the zeta potential of the LNP. Samples are diluted 1:17 (50 μL into 800 μL) in 0.1×PBS, pH 7.4 prior to measurement.

[0754] A fluorescence-based assay (Ribogreen®, ThermoFisher Scientific) is used to determine total RNA concentration and free RNA. LNP samples are diluted appropriately with 1×TE buffer containing 0.2% Triton-X 100 to determine total RNA or 1×TE buffer to determine free RNA. Standard curves are prepared by utilizing the starting RNA solution used to make the compositions and diluted in 1×TE buffer+/−0.2% Triton-X 100. Diluted RiboGreen® dye (according to the manufacturer's instructions) is then added to each of the standards and samples and allowed to incubate for approximately 10 minutes at room temperature, in the absence of light. A SpectraMax M5 Microplate Reader (Molecular Devices) is used to read the samples with excitation, auto cutoff and emission wavelengths set to 488 nm, 515 nm, and 525 nm respectively. Total RNA and free RNA are determined from the appropriate standard curves.

[0755] Encapsulation efficiency is calculated as (Total RNA−Free RNA)/Total RNA. The same procedure may be used for determining the encapsulation efficiency of a DNA-based cargo component. In a fluorescence-based assay, for single-strand DNA Oligreen Dye may be used, and for double-strand DNA, Picogreen Dye. Alternatively, the total RNA concentration can be determined by a reverse-phase ion-pairing (RP-IP) HPLC method. Triton X-100 is used to disrupt the LNPs, releasing the RNA. The RNA is then separated from the lipid components chromatographically by RP-IP HPLC and quantified against a standard curve using UV absorbance at 260 nm.

[0756] AF4-MALS is used to look at molecular weight and size distributions as well as secondary statistics from those calculations. LNPs are diluted as appropriate and injected into a AF4 separation channel using an HPLC autosampler where they are focused and then eluted with an exponential gradient in cross flow across the channel. All fluid is driven by an HPLC pump and Wyatt Eclipse Instrument. Particles eluting from the AF4 channel flow through a UV detector, multi-angle light scattering detector, quasi-elastic light scattering detector and differential refractive index detector. Raw data is processed by using a Debeye model to determine molecular weight and rms radius from the detector signals.

[0757] Lipid components in LNPs are analyzed quantitatively by HPLC coupled to a charged aerosol detector (CAD). Chromatographic separation of 4 lipid components is achieved by reverse phase HPLC. CAD is a destructive mass-based detector which detects all non-volatile compounds and the signal is consistent regardless of analyte structure.

[0758] Typically, when preparing LNPs, encapsulation was >80%, particle size was <120 nm, and pdi was <0.2.

### LNP Delivery In Vivo

[0759] Unless otherwise noted, CD-1 female mice, ranging from 6-10 weeks of age were used in each study. Animals were weighed and grouped according to body weight for preparing dosing solutions based on group average weight. LNPs were dosed via the lateral tail vein in a volume of 0.2 mL per animal (approximately 10 mL per kilogram body weight). The animals were observed at approximately 6 hours post dose for adverse effects. Body weight was measured at twenty-four hours post-administration, and animals were euthanized at various time points by exsanguination via cardiac puncture under isoflourane anesthesia. Blood was collected into serum separator tubes or into tubes containing buffered sodium citrate for plasma as described herein. For studies involving in vivo editing, liver tissue was typically collected from the median lobe or from three independent lobes (e.g., the right median, left median, and left lateral lobes) from each animal for DNA extraction and analysis.

### Transthyretin (TTR) ELISA Analysis Used in Animal Studies

[0760] Blood was collected and the serum was isolated as indicated. The total mouse TTR serum levels were determined using a Mouse Prealbumin (Transthyretin) ELISA Kit (Aviva Systems Biology, Cat. OKIA00111); rat TTR serum levels were measured using a rat specific ELISA kit (Aviva Systems Biology catalog number OKIA00159); human TTR serum levels were measured using a human specific ELISA kit (Aviva Systems Biology catalog number OKIA00081); each according to manufacture's protocol. Briefly, sera were serial diluted with kit sample diluent to a final dilution of 10,000-fold, or 5,000-fold when measuring human TTR in mouse sera. 100 ul of the prepared standard curve or diluted serum samples were added to the ELISA plate, incubated for 30 minutes at room temperature then washed 3 times with provided wash buffer. 100 uL of detection antibody was then added to each well and incubated for 20 minutes at room temperature followed by 3 washes. 100 uL of substrate is added then incubated for 10 minutes at room temperature before the addition of 100 uL stop solution. The absorbance of the contents was measured on the Spectramax M5 plate reader with analysis using SoftmaxPro version 7.0 software. Serum TTR levels were quantitated off the standard curve using 4 parameter logistic fit and expressed as ug/mL of serum or percent knockdown relative control (vehicle treated) animals.

### Genomic DNA Isolation

[0761] Transfected cells were harvested post-transfection at 24, 48, or 72 hours. The genomic DNA was extracted from each well of a 96-well plate using 50 μL/well BuccalAmp DNA Extraction solution (Epicentre, Cat. QE09050) per manufacturer's protocol. All DNA samples were subjected to PCR and subsequent NGS analyses, as described herein.

### Next-Generation Sequencing (“NGS”) Analysis

[0762] To quantitatively determine the efficiency of editing at the target location in the genome, sequencing was utilized to identify the presence of insertions and deletions introduced by gene editing.

[0763] Primers were designed around the target site within the gene of interest (e.g. TTR), and the genomic area of interest was amplified.

[0764] Additional PCR was performed per the manufacturer's protocols (Illumina) to add chemistry for sequencing. The amplicons were sequenced on an Illumina MiSeq instrument. The reads were aligned to a reference genome (e.g., the human reference genome (hg38), the cynomologus reference genome (mf5), the rat reference genome (rn6), or the mouse reference genome (mm10)) after eliminating those having low quality scores. The resulting files containing the reads were mapped to the reference genome (BAM files), where reads that overlapped the target region of interest were selected and the number of wild type reads versus the number of reads which contain an insertion, substitution, or deletion was calculated.

[0765] The editing percentage (e.g., the “editing efficiency” or “percent editing” or “indel frequency”) is defined as the total number of sequence reads with insertions/deletions (“indels”) or substitutions over the total number of sequence reads, including wild type.

### Analysis of Secreted Transthyretin (“TTR”) Protein by Western Blot

[0766] Secreted levels of TTR protein in media were determined using western blotting methods. HepG2 cells were transfected as previously described with select guides from Table 1. Media changes were performed every 3 days post transfection. Six days post-transfection, the media was removed, and cells were washed once with media that did not contain fetal bovine serum (FBS). Media without serum was added to the cells and incubated at 37° C. After 4 hrs the media was removed and centrifuged to pellet any debris; cell number for each well was estimated based on the values obtained from a CTG assay on remaining cells and comparison to the plate average. After centrifugation, the media was transferred to a new plate and stored at −20° C. An acetone precipitation of the media was performed to precipitate any protein that had been secreted into the media. Four volumes of ice cold acetone were added to one volume of media. The solution was mixed well and kept at −20° C. for 90 min. The acetone:media mixture was centrifuged at 15,000×g and 4° C. for 15 min. The supernatant was discarded and the retained pellet was air dried to eliminate any residual acetone. The pellet was resuspended in 154 RIPA buffer (Boston Bio Products, Cat. BP-115) plus freshly added protease inhibitor mixture consisting of complete protease inhibitor cocktail (Sigma, Cat. 11697498001) and 1 mM DTT. Lysates were mixed with Laemmli buffer and denatured at 95° C. for 10 minutes. Western blots were run using the NuPage system on 12% Bis-Tris gels (ThermoFisher) per the manufacturer's protocol followed by wet transfer onto 0.45 μm nitrocellulose membrane (Bio-Rad, Cat. 1620115). Blots were blocked using 5% Dry Milk in TBS for 30 minutes on a lab rocker at room temperature. Blots were rinsed with TBST and probed with rabbit α-TTR monoclonal antibody (Abcam, Cat. Ab75815) at 1:1000 in TBST. Alpha-1 antitrypsin was used as a loading control (Sigma, Cat. HPA001292) at 1:1000 in TBST and incubated simultaneously with the TTR primary antibody. Blots were sealed in a bag and kept overnight at 4° C. on a lab rocker. After incubation, blots were rinsed 3 times for 5 min each in TBST and probed with secondary antibodies to Rabbit (ThermoFisher, Cat. PISA535571) at 1:25,000 in TBST for 30 min at room temperature. After incubation, blots were rinsed 3 times for 5 min each in TBST and 2 times with PBS. Blots were visualized and analyzed using a Licor Odyssey system.

### Analysis of Intracellular TTR by Western Blot

[0767] The hepatocellular carcinoma cell line, HUH7, was transfected as previously described with select guides from Table 1. Six-days post-transfection, the media was removed and the cells were lysed with 50 μL/well RIPA buffer (Boston Bio Products, Cat. BP-115) plus freshly added protease inhibitor mixture consisting of complete protease inhibitor cocktail (Sigma, Cat. 11697498001), 1 mM DTT, and 250 U/ml Benzonase (EMD Millipore, Cat. 71206-3). Cells were kept on ice for 30 minutes at which time NaCl (1 M final concentration) was added. Cell lysates were thoroughly mixed and retained on ice for 30 minutes. The whole cell extracts (“WCE”) were transferred to a PCR plate and centrifuged to pellet debris. A Bradford assay (Bio-Rad, Cat. 500-0001) was used to assess protein content of the lysates. The Bradford assay procedure was completed per the manufacturer's protocol. Extracts were stored at minus 20° C. prior to use. Western blots were performed to assess intracellular TTR protein levels. Lysates were mixed with Laemmli buffer and denatured at 95° C. for 10 min. Western blots were run using the NuPage system on 12% Bis-Tris gels (ThermoFisher) per the manufacturer's protocol followed by wet transfer onto 0.45 μm nitrocellulose membrane (Bio-Rad, Cat. 1620115). After transfer membranes were rinsed thoroughly with water and stained with Ponceau S solution (Boston Bio Products, Cat. ST-180) to confirm complete and even transfer. Blots were blocked using 5% Dry Milk in TBS for 30 minutes on a lab rocker at room temperature. Blots were rinsed with TBST and probed with rabbit α-TTR monoclonal antibody (Abcam, Cat. Ab75815) at 1:1000 in TBST. (3-actin was used as a loading control (ThermoFisher, Cat. AM4302) at 1:2500 in TBST and incubated simultaneously with the TTR primary antibody. Blots were sealed in a bag and kept overnight at 4° C. on a lab rocker. After incubation, blots were rinsed 3 times for 5 minutes each in TBST and probed with secondary antibodies to Mouse and Rabbit (ThermoFisher, Cat. PI35518 and PISA535571) at 1:25,000 each in TBST for 30 min at room temperature. After incubation, blots were rinsed 3 times for 5 min each in TBST and 2 times with PBS. Blots were visualized and analyzed using a Licor Odyssey system.

### Example 2. Screening of dgRNA Sequences

[0768] Cross Screening of TTR dgRNAs in Multiple Cell Types

[0769] Guides in dgRNA format targeting human TTR and the cynomologus matched sequences were delivered to HEK293_Cas9, HUH7 and HepG2 cell lines, as well as primary human hepatocytes and primary cynomolgus monkey hepatocytes as described in Example 1. Percent editing was determined for crRNAs comprising each guide sequence across each cell type and the guide sequences were then rank ordered based on highest % edit. The screening data for the guide sequences in Table 1 in all five cell lines are listed below (Table 4 through 11).

[0770] Table 6 shows the average and standard deviation for % Edit, % Insertion (Ins), and % Deletion (Del) for the TTR crRNAs in the human kidney adenocarcinoma cell line, HEK293_Cas9, which constitutively over expresses Spy Cas9 protein.

TABLE 6
TTR editing data in Hek_Cas9 cells transfected with dgRNAs

| | Avg | Std | Avg | Std | Avg | Std |
|---|---|---|---|---|---|---|
| | % | Dev % | % | Dev % | % | Dev % |
| GUIDE ID | Edit | Edit | Insert | Insert | Deletion | Deletion |
| CR003335 | 26.59 | 4.73 | 4.73 | 0.65 | 21.87 | 4.09 |
| CR003336 | 29.09 | 4.57 | 3.31 | 0.24 | 25.78 | 4.32 |
| CR003337 | 42.72 | 1.72 | 5.24 | 1.62 | 37.48 | 0.70 |
| CR003338 | 52.42 | 3.28 | 4.76 | 0.03 | 47.66 | 3.30 |
| CR003339 | 56.37 | 4.13 | 49.39 | 3.23 | 6.98 | 0.91 |
| CR003340 | 42.38 | 8.43 | 27.88 | 4.31 | 14.50 | 4.13 |
| CR003341 | 20.04 | 5.26 | 6.73 | 1.86 | 13.31 | 3.41 |
| CR003342 | 36.57 | 5.80 | 1.19 | 0.22 | 35.38 | 5.59 |
| CR003343 | 24.36 | 1.51 | 4.82 | 0.43 | 19.53 | 1.39 |
| CR003344 | 33.87 | 2.93 | 4.32 | 0.58 | 29.54 | 2.37 |
| CR003345 | 35.02 | 7.05 | 19.00 | 3.58 | 16.01 | 3.48 |
| CR003346 | 48.33 | 5.81 | 33.03 | 3.12 | 15.30 | 2.72 |
| CR003347 | 21.45 | 5.57 | 0.95 | 0.33 | 20.50 | 5.26 |
| CR003348 | 35.53 | 5.81 | 22.32 | 3.79 | 13.21 | 2.03 |
| CR003349 | 13.19 | 4.46 | 8.03 | 2.81 | 5.16 | 1.66 |
| CR003350 | 22.31 | 4.25 | 5.54 | 0.74 | 16.77 | 3.51 |
| CR003351 | 49.67 | 3.77 | 28.42 | 1.69 | 21.24 | 2.22 |
| CR003352 | 27.90 | 7.55 | 4.91 | 1.35 | 22.99 | 6.26 |
| CR003353 | 25.03 | 5.16 | 3.71 | 0.75 | 21.32 | 4.42 |
| CR003354 | 18.46 | 2.02 | 2.56 | 0.21 | 15.90 | 1.89 |
| CR003355 | 30.60 | 2.53 | 6.99 | 0.80 | 23.61 | 1.75 |
| CR003356 | 32.21 | 4.71 | 10.03 | 1.39 | 22.19 | 3.36 |
| CR003357 | 43.23 | 6.71 | 5.38 | 0.87 | 37.85 | 5.88 |
| CR003358 | 5.44 | 0.86 | 1.29 | 0.16 | 4.14 | 0.84 |
| CR003359 | 37.75 | 7.50 | 18.35 | 3.73 | 19.40 | 3.78 |
| CR003360 | 22.68 | 3.16 | 2.70 | 0.56 | 19.98 | 2.60 |
| CR003361 | 34.45 | 8.97 | 8.66 | 1.66 | 25.78 | 7.32 |
| CR003362 | 9.90 | 2.66 | 1.48 | 0.33 | 8.41 | 2.33 |
| CR003363 | 31.03 | 10.74 | 14.77 | 4.21 | 16.26 | 6.54 |
| CR003364 | 35.65 | 7.90 | 19.17 | 4.24 | 16.48 | 3.76 |
| CR003365 | 36.43 | 6.20 | 11.83 | 1.88 | 24.61 | 4.45 |
| CR003366 | 47.36 | 6.59 | 10.10 | 1.28 | 37.26 | 5.32 |
| CR003367 | 47.11 | 15.43 | 28.44 | 9.11 | 18.67 | 6.33 |
| CR003368 | 40.35 | 10.13 | 3.73 | 0.96 | 36.61 | 9.17 |
| CR003369 | 33.10 | 7.26 | 9.06 | 1.12 | 24.04 | 6.16 |
| CR003370 | 34.22 | 5.69 | 4.49 | 0.67 | 29.73 | 5.06 |
| CR003371 | 25.60 | 8.33 | 3.84 | 1.41 | 21.76 | 6.92 |
| CR003372 | 15.24 | 7.92 | 3.25 | 1.61 | 11.99 | 6.31 |
| CR003373 | 13.55 | 2.40 | 1.31 | 0.21 | 12.25 | 2.19 |
| CR003374 | 10.91 | 0.88 | 0.81 | 0.10 | 10.10 | 0.81 |
| CR003375 | 11.63 | 3.18 | 0.78 | 0.17 | 10.85 | 3.05 |
| CR003376 | 28.16 | 4.49 | 1.35 | 0.18 | 26.81 | 4.52 |
| CR003377 | 24.70 | 4.44 | 2.71 | 0.54 | 21.99 | 3.91 |
| CR003378 | 20.97 | 2.67 | 4.49 | 0.49 | 16.48 | 2.18 |
| CR003379 | 26.32 | 2.91 | 5.34 | 0.61 | 20.98 | 2.30 |
| CR003380 | 47.64 | 5.74 | 3.64 | 0.24 | 44.00 | 5.52 |
| CR003381 | 22.04 | 5.74 | 3.82 | 1.26 | 18.23 | 4.64 |
| CR003382 | 29.95 | 3.13 | 4.46 | 0.45 | 25.49 | 2.73 |
| CR003383 | 40.47 | 0.64 | 25.12 | 0.45 | 15.35 | 0.66 |
| CR003384 | 17.45 | 1.32 | 1.45 | 0.23 | 16.00 | 1.42 |
| CR003385 | 26.19 | 5.62 | 7.36 | 1.57 | 18.82 | 4.06 |
| CR003386 | 33.12 | 10.65 | 2.94 | 0.63 | 30.18 | 10.03 |
| CR003387 | 24.68 | 5.93 | 7.75 | 1.99 | 16.92 | 3.94 |
| CR003388 | 19.23 | 4.41 | 1.41 | 0.39 | 17.82 | 4.07 |
| CR003389 | 34.18 | 5.09 | 10.30 | 2.12 | 23.87 | 3.02 |
| CR003390 | 28.02 | 3.77 | 4.31 | 0.25 | 23.71 | 3.61 |
| CR003391 | 44.81 | 4.67 | 0.61 | 0.07 | 44.19 | 4.63 |
| CR003392 | 21.67 | 7.52 | 0.85 | 0.26 | 20.82 | 7.27 |

[0771] Table 7 shows the average and standard deviation for % Edit, % Insertion (Ins), and % Deletion (Del) for the tested TTR crRNAs co-transfected with Spy Cas9 mRNA (SEQ ID NO:2) in the human hepatocellular carcinoma cell line, HUH7.

TABLE 7
TTR editing data in HUH7 cells transfected
with Spy Cas9 mRNA and dgRNAs

| | Avg | Std | Avg | Std | Avg | Std |
|---|---|---|---|---|---|---|
| | % | Dev % | % | Dev % | % | Dev % |
| GUIDE ID | Edit | Edit | Insert | Insert | Deletion | Deletion |
| CR003335 | 31.95 | 4.50 | 4.62 | 0.83 | 27.57 | 4.08 |
| CR003336 | 30.05 | 4.25 | 4.14 | 1.07 | 26.56 | 3.55 |
| CR003337 | 55.72 | 3.12 | 8.34 | 0.93 | 48.95 | 2.24 |
| CR003338 | 75.64 | 2.03 | 10.22 | 1.42 | 67.06 | 2.79 |
| CR003339 | 79.97 | 4.73 | 60.55 | 3.94 | 20.13 | 1.02 |
| CR003340 | 46.93 | 7.12 | 33.33 | 6.01 | 14.23 | 1.65 |
| CR003341 | 20.58 | 5.98 | 7.78 | 1.64 | 13.20 | 4.44 |
| CR003342 | 45.14 | 7.16 | 1.23 | 0.91 | 44.66 | 7.68 |
| CR003343 | 76.13 | 7.04 | 9.58 | 3.49 | 66.97 | 6.10 |
| CR003344 | 64.02 | 3.33 | 10.76 | 1.35 | 54.40 | 2.71 |
| CR003345 | 72.43 | 2.17 | 41.33 | 0.96 | 32.18 | 1.37 |
| CR003346 | 18.07 | 1.02 | 13.17 | 1.39 | 6.97 | 3.06 |
| CR003347 | 32.16 | 5.50 | 1.64 | 0.42 | 30.79 | 5.11 |
| CR003348 | 57.14 | 10.98 | 36.08 | 6.97 | 22.71 | 4.42 |
| CR003349 | 14.14 | 4.99 | 9.73 | 3.26 | 4.82 | 1.91 |
| CR003350 | 52.91 | 7.61 | 13.43 | 2.00 | 41.64 | 6.03 |
| CR003351 | 63.51 | 4.61 | 36.87 | 2.49 | 27.49 | 2.14 |
| CR003352 | 39.68 | 9.53 | 7.62 | 7.42 | 32.79 | 7.37 |
| CR003353 | 69.18 | 4.59 | 7.73 | 2.46 | 62.87 | 3.13 |
| CR003354 | 12.27 | 3.38 | 1.25 | 0.40 | 11.46 | 3.23 |
| CR003355 | 38.83 | 5.31 | 9.40 | 1.81 | 30.31 | 3.56 |
| CR003356 | 49.63 | 5.55 | 18.98 | 2.67 | 31.31 | 3.04 |
| CR003357 | 36.31 | 5.72 | 6.37 | 1.17 | 30.82 | 4.68 |
| CR003358 | 36.50 | 6.17 | 10.53 | 1.56 | 26.60 | 4.49 |
| CR003359 | 66.75 | 5.84 | 21.73 | 2.30 | 45.97 | 3.93 |
| CR003360 | 58.62 | 8.73 | 5.01 | 0.60 | 55.13 | 8.19 |
| CR003361 | 28.68 | 6.52 | 6.84 | 1.26 | 22.44 | 5.31 |
| CR003362 | 26.43 | 0.83 | 3.43 | 0.32 | 23.76 | 0.85 |
| CR003363 | 41.01 | 7.16 | 17.83 | 3.32 | 23.78 | 3.97 |
| CR003364 | 47.13 | 10.61 | 24.68 | 5.15 | 23.03 | 5.74 |
| CR003365 | 60.68 | 5.25 | 17.77 | 1.57 | 43.82 | 3.73 |
| CR003366 | 69.98 | 8.84 | 20.77 | 3.10 | 50.32 | 5.69 |
| CR003367 | 66.29 | 4.48 | 33.62 | 4.14 | 33.48 | 0.51 |
| CR003368 | 31.57 | 11.73 | 3.08 | 0.92 | 29.69 | 11.32 |
| CR003369 | 24.19 | 6.89 | 7.12 | 2.27 | 17.38 | 4.76 |
| CR003370 | 39.16 | 11.59 | 4.83 | 1.79 | 35.55 | 10.35 |
| CR003371 | 40.47 | 7.68 | 6.07 | 0.89 | 35.65 | 7.01 |
| CR003372 | 21.52 | 6.02 | 4.89 | 1.66 | 17.25 | 4.58 |
| CR003373 | 27.29 | 4.45 | 3.31 | 0.66 | 25.12 | 4.12 |
| CR003374 | 3.10 | 0.68 | 0.45 | 0.24 | 2.87 | 0.54 |
| CR003375 | 2.38 | 0.22 | 0.26 | 0.14 | 2.25 | 0.12 |
| CR003376 | 19.42 | 5.60 | 1.37 | 0.45 | 18.55 | 5.28 |
| CR003377 | 34.93 | 5.47 | 5.59 | 0.88 | 29.89 | 4.71 |
| CR003378 | 40.73 | 4.63 | 9.73 | 1.85 | 32.27 | 2.91 |
| CR003379 | 19.18 | 5.17 | 3.38 | 0.77 | 16.48 | 4.32 |
| CR003380 | 31.76 | 5.81 | 3.29 | 0.57 | 29.29 | 5.42 |
| CR003381 | 99.70 | 0.17 | 1.92 | 0.20 | 99.70 | 0.17 |
| CR003382 | 34.47 | 5.71 | 0.14 | 0.16 | 34.47 | 5.71 |
| CR003383 | 42.89 | 10.14 | 2.14 | 0.56 | 41.19 | 9.67 |
| CR003384 | 17.03 | 1.95 | 0.84 | 0.30 | 16.29 | 1.84 |
| CR003386 | 69.40 | 19.41 | 0.53 | 0.23 | 69.34 | 19.32 |
| CR003387 | 25.64 | 3.69 | 0.23 | 0.07 | 25.55 | 3.62 |
| CR003388 | 59.48 | 4.29 | 3.88 | 0.68 | 56.45 | 4.45 |
| CR003389 | 62.32 | 1.97 | 13.19 | 1.18 | 50.90 | 1.02 |
| CR003390 | 18.97 | 4.82 | 3.31 | 0.91 | 16.49 | 3.98 |
| CR003391 | 61.31 | 13.21 | 2.10 | 0.51 | 59.70 | 12.76 |
| CR003392 | 28.37 | 8.58 | 1.93 | 0.73 | 26.98 | 7.94 |

[0772] Table 8 shows the average and standard deviation for % Edit, % Insertion (Ins), and % Deletion (Del) for the tested TTR and control crRNAs co-transfected with Spy Cas9 mRNA (SEQ ID NO:2) in the human hepatocellular carcinoma cell line, HepG2.

TABLE 8
TTR editing data in HepG2 cells transfected
with Spy Cas9 mRNA and dgRNAs

| | Avg | Std | Avg | Std | Avg | Std |
|---|---|---|---|---|---|---|
| | % | Dev % | % | Dev % | % | Dev % |
| GUIDE ID | Edit | Edit | Insert | Insert | Deletion | Deletion |
| CR001261 | 49.16 | 7.45 | 16.46 | 3.46 | 32.71 | 4.06 |
| (control) | | | | | | |
| CR001262 | 63.33 | 5.66 | 59.88 | 4.92 | 3.45 | 0.86 |
| (control) | | | | | | |
| CR001263 | 39.19 | 6.98 | 37.59 | 8.01 | 1.60 | 1.92 |
| (control) | | | | | | |
| CR001264 | 57.09 | 12.14 | 47.47 | 9.25 | 9.61 | 2.89 |
| (control) | | | | | | |
| CR003335 | 37.19 | 2.12 | 32.96 | 1.67 | 4.23 | 0.59 |
| CR003336 | 31.31 | 5.47 | 30.48 | 5.10 | 0.83 | 0.75 |
| CR003337 | 61.93 | 2.68 | 59.28 | 2.11 | 2.65 | 1.39 |
| CR003338 | 68.00 | 6.09 | 65.40 | 6.78 | 2.60 | 1.17 |
| CR003339 | 68.21 | 7.67 | 12.37 | 1.47 | 55.84 | 6.31 |
| CR003340 | 37.76 | 6.01 | 6.12 | 1.95 | 31.65 | 4.07 |
| CR003341 | 15.60 | 5.49 | 9.94 | 3.38 | 5.66 | 2.13 |
| CR003342 | 11.06 | 6.71 | 10.78 | 6.69 | 0.28 | 0.03 |
| CR003343 | 45.41 | 15.20 | 40.05 | 10.79 | 5.36 | 5.20 |
| CR003344 | 33.43 | 6.11 | 29.81 | 5.09 | 3.62 | 1.13 |
| CR003345 | 10.58 | 9.25 | 6.12 | 5.38 | 4.45 | 3.87 |
| CR003346 | 0.13 | 0.05 | 0.07 | 0.02 | 0.05 | 0.03 |
| CR003347 | 22.57 | 10.94 | 21.08 | 11.19 | 1.49 | 0.90 |
| CR003348 | 38.44 | 10.45 | 17.04 | 5.04 | 21.40 | 5.89 |
| CR003349 | 8.36 | 2.19 | 4.46 | 1.75 | 3.91 | 0.76 |
| CR003350 | 29.60 | 5.17 | 25.16 | 4.56 | 4.44 | 0.67 |
| CR003351 | 57.54 | 5.67 | 31.98 | 2.63 | 25.57 | 3.08 |
| CR003352 | 44.28 | 8.71 | 39.51 | 7.10 | 4.77 | 1.79 |
| CR003353 | 60.40 | 11.37 | 56.71 | 9.95 | 3.68 | 1.45 |
| CR003354 | 5.36 | 3.94 | 4.84 | 3.41 | 0.53 | 0.71 |
| CR003355 | 15.80 | 5.38 | 12.36 | 4.23 | 3.44 | 1.16 |
| CR003356 | 9.39 | 1.82 | 5.67 | 1.03 | 3.72 | 0.92 |
| CR003357 | 45.83 | 10.66 | 42.37 | 8.47 | 3.46 | 2.28 |
| CR003358 | 35.93 | 7.34 | 28.66 | 7.76 | 7.27 | 1.77 |
| CR003359 | 64.44 | 14.90 | 48.79 | 14.32 | 15.65 | 1.94 |
| CR003360 | 41.31 | 12.23 | 38.94 | 10.60 | 2.38 | 1.78 |
| CR003361 | 14.05 | 4.79 | 11.47 | 4.35 | 2.58 | 0.43 |
| CR003362 | 17.44 | 4.34 | 16.50 | 4.86 | 0.94 | 0.52 |
| CR003363 | 42.65 | 9.90 | 28.58 | 6.95 | 14.07 | 3.01 |
| CR003364 | 51.88 | 7.67 | 31.03 | 2.67 | 20.85 | 5.03 |
| CR003365 | 46.88 | 15.78 | 35.77 | 13.49 | 11.11 | 2.30 |
| CR003366 | 54.69 | 9.10 | 46.20 | 8.98 | 8.49 | 1.11 |
| CR003367 | 45.55 | 8.19 | 24.28 | 6.57 | 21.27 | 1.62 |
| CR003368 | 51.55 | 8.60 | 48.34 | 9.87 | 3.22 | 1.36 |
| CR003369 | 22.62 | 4.01 | 17.11 | 4.47 | 5.51 | 2.52 |
| CR003370 | 28.51 | 6.94 | 24.88 | 6.17 | 3.62 | 1.45 |
| CR003371 | 15.91 | 4.17 | 14.07 | 4.02 | 1.84 | 0.22 |
| CR003372 | 14.57 | 2.47 | 12.14 | 2.08 | 2.42 | 0.40 |
| CR003373 | 17.69 | 8.41 | 15.92 | 6.44 | 1.77 | 1.97 |
| CR003374 | 5.43 | 0.53 | 5.12 | 0.62 | 0.31 | 0.36 |
| CR003375 | 2.06 | 0.04 | 1.96 | 0.06 | 0.10 | 0.03 |
| CR003376 | 14.41 | 3.01 | 14.16 | 2.93 | 0.24 | 0.10 |
| CR003377 | 16.30 | 2.85 | 15.29 | 2.59 | 1.02 | 0.59 |
| CR003378 | 8.16 | 3.83 | 6.82 | 3.43 | 1.34 | 0.61 |
| CR003379 | 19.74 | 4.24 | 17.70 | 4.30 | 2.04 | 0.33 |
| CR003380 | 17.08 | 2.48 | 14.78 | 1.18 | 2.30 | 1.36 |
| CR003381 | 6.81 | 3.48 | 6.18 | 3.82 | 0.63 | 0.44 |
| CR003382 | 1.73 | 0.14 | 1.58 | 0.12 | 0.15 | 0.03 |
| CR003383 | 6.35 | 1.67 | 6.19 | 1.68 | 0.16 | 0.04 |
| CR003384 | 3.37 | 0.88 | 3.12 | 0.94 | 0.25 | 0.09 |
| CR003385 | 53.94 | 9.41 | 46.32 | 10.66 | 7.62 | 1.29 |
| CR003386 | 2.71 | 0.76 | 2.15 | 0.77 | 0.56 | 0.53 |
| CR003387 | 1.39 | 0.15 | 1.27 | 0.17 | 0.12 | 0.02 |
| CR003388 | 9.33 | 4.47 | 7.76 | 4.56 | 1.56 | 0.10 |
| CR003389 | 31.84 | 6.09 | 27.27 | 5.96 | 4.57 | 1.21 |
| CR003390 | 24.88 | 4.96 | 22.44 | 3.41 | 2.44 | 2.25 |
| CR003391 | 48.78 | 14.41 | 48.28 | 14.44 | 0.50 | 0.52 |
| CR003392 | 14.64 | 5.25 | 14.32 | 4.95 | 0.33 | 0.36 |
| CR005298 | 42.65 | 10.94 | 21.29 | 8.16 | 21.36 | 2.87 |
| CR005299 | 38.61 | 5.57 | 36.32 | 3.99 | 2.30 | 2.11 |
| CR005300 | 64.34 | 9.55 | 53.20 | 6.59 | 11.15 | 3.33 |
| CR005301 | 37.04 | 5.32 | 33.39 | 3.85 | 3.65 | 1.89 |
| CR005302 | 33.21 | 2.19 | 30.93 | 2.43 | 2.29 | 0.24 |
| CR005303 | 21.63 | 6.05 | 20.55 | 5.80 | 1.08 | 0.25 |
| CR005304 | 62.82 | 3.28 | 8.07 | 1.22 | 54.75 | 4.27 |
| CR005305 | 13.51 | 3.58 | 12.30 | 3.49 | 1.21 | 0.84 |
| CR005306 | 24.07 | 5.24 | 21.20 | 5.03 | 2.87 | 1.10 |
| CR005307 | 22.03 | 3.86 | 7.70 | 1.35 | 14.33 | 4.15 |

[0773] Table 9 shows the average and standard deviation for % Edit, % Insertion (Ins), and % Deletion (Del) for the tested FIR dgRNAs electroporated with Spy Cas9 protein (RNP) in primary human hepatocytes.

TABLE 9
TTR editing data in primary human hepatocytes electroporated
with Spy Cas9 protein loaded with dgRNAs

| | Avg | Std | Avg | Std | Avg | Std |
|---|---|---|---|---|---|---|
| | % | Dev % | % | Dev % | % | Dev % |
| GUIDE ID | Edit | Edit | Insert | Insert | Deletion | Deletion |
| CR003335 | 72.20 | 4.53 | 69.70 | 4.36 | 2.50 | 0.30 |
| CR003336 | 39.17 | 3.04 | 38.43 | 3.20 | 0.70 | 0.17 |
| CR003337 | 54.27 | 2.70 | 53.23 | 3.05 | 1.30 | 0.26 |
| CR003338 | 83.03 | 4.84 | 80.87 | 4.63 | 2.13 | 0.25 |
| CR003339 | 43.00 | 2.66 | 8.93 | 1.86 | 34.07 | 1.72 |
| CR003340 | 12.03 | 1.55 | 5.60 | 1.32 | 6.50 | 0.53 |
| CR003341 | 11.43 | 0.71 | 7.03 | 0.50 | 4.40 | 1.21 |
| CR003342 | 32.77 | 3.63 | 31.87 | 3.28 | 0.90 | 0.35 |
| CR003343 | 77.10 | 2.21 | 75.63 | 2.01 | 1.50 | 0.36 |
| CR003344 | 39.40 | 3.86 | 33.30 | 2.52 | 6.10 | 1.31 |
| CR003345 | 48.07 | 6.24 | 34.53 | 2.95 | 13.57 | 3.74 |
| CR003346 | 35.67 | 1.80 | 20.83 | 1.65 | 14.83 | 1.66 |
| CR003347 | 82.30 | 5.93 | 81.97 | 5.98 | 0.43 | 0.15 |
| CR003348 | 28.53 | 1.79 | 11.30 | 2.46 | 17.27 | 0.86 |
| CR003349 | 4.10 | 0.17 | 2.33 | 0.46 | 1.87 | 0.25 |
| CR003350 | 28.13 | 3.50 | 22.40 | 2.41 | 5.73 | 1.22 |
| CR003351 | 51.77 | 5.11 | 30.83 | 3.32 | 20.97 | 2.43 |
| CR003352 | 29.83 | 4.18 | 25.63 | 3.67 | 4.30 | 0.56 |
| CR003353 | 84.83 | 4.68 | 82.23 | 4.05 | 2.63 | 0.74 |
| CR003354 | 2.50 | 0.36 | 2.43 | 0.32 | 0.03 | 0.06 |
| CR003355 | 12.53 | 1.54 | 10.60 | 2.36 | 1.97 | 1.17 |
| CR003356 | 9.97 | 2.68 | 7.80 | 2.01 | 2.23 | 0.85 |
| CR003357 | 36.23 | 4.02 | 35.47 | 4.11 | 0.77 | 0.61 |
| CR003358 | 5.70 | 1.42 | 4.93 | 1.36 | 0.80 | 0.26 |
| CR003359 | 63.77 | 7.07 | 56.33 | 5.81 | 7.50 | 1.35 |
| CR003360 | 32.23 | 3.09 | 31.67 | 2.97 | 0.63 | 0.31 |
| CR003361 | 4.10 | 0.36 | 3.73 | 0.42 | 0.37 | 0.06 |
| CR003362 | 7.03 | 1.30 | 6.87 | 1.20 | 0.20 | 0.20 |
| CR003363 | 9.43 | 8.22 | 7.80 | 6.86 | 1.63 | 1.44 |
| CR003364 | 23.30 | 5.20 | 16.93 | 4.96 | 6.53 | 0.55 |
| CR003365 | 42.37 | 3.88 | 35.57 | 1.88 | 6.83 | 2.00 |
| CR003366 | 34.70 | 3.26 | 31.63 | 2.98 | 3.10 | 1.15 |
| CR003367 | 39.20 | 5.31 | 22.93 | 4.14 | 16.37 | 1.46 |
| CR003368 | 28.47 | 3.29 | 27.63 | 2.90 | 0.80 | 0.66 |
| CR003369 | 3.67 | 1.16 | 3.30 | 1.06 | 0.40 | 0.20 |
| CR003370 | 15.27 | 1.75 | 14.43 | 1.72 | 0.90 | 0.20 |
| CR003371 | 16.20 | 2.13 | 14.47 | 2.37 | 1.87 | 0.81 |
| CR003372 | 12.17 | 2.69 | 10.47 | 2.63 | 1.77 | 0.12 |
| CR003373 | 0.87 | 0.21 | 0.83 | 0.25 | 0.07 | 0.12 |
| CR003374 | 0.80 | 0.17 | 0.70 | 0.26 | 0.10 | 0.10 |
| CR003375 | 1.33 | 1.10 | 1.27 | 1.08 | 0.07 | 0.06 |
| CR003376 | 1.90 | 1.06 | 1.87 | 1.00 | 0.03 | 0.06 |
| CR003377 | 10.23 | 1.53 | 10.13 | 1.51 | 0.10 | 0.10 |
| CR003378 | 4.60 | 1.92 | 3.87 | 1.19 | 0.73 | 0.67 |
| CR003379 | 6.57 | 1.00 | 6.30 | 0.70 | 0.27 | 0.31 |
| CR003380 | 5.37 | 2.57 | 5.27 | 2.54 | 0.10 | 0.10 |
| CR003381 | 6.20 | 2.74 | 5.83 | 2.61 | 0.50 | 0.10 |
| CR003382 | 8.40 | 2.07 | 8.10 | 1.87 | 0.43 | 0.21 |
| CR003383 | 8.57 | 0.75 | 3.37 | 0.67 | 5.27 | 0.46 |
| CR003384 | 1.87 | 0.67 | 1.73 | 0.57 | 0.23 | 0.12 |
| CR003385 | 40.87 | 6.86 | 38.43 | 6.41 | 2.53 | 0.45 |
| CR003386 | 4.90 | 1.20 | 4.47 | 1.14 | 0.47 | 0.25 |
| CR003387 | 1.87 | 0.25 | 1.70 | 0.26 | 0.20 | 0.10 |
| CR003388 | 5.70 | 0.40 | 5.47 | 0.40 | 0.27 | 0.12 |
| CR003389 | 27.67 | 2.76 | 27.20 | 2.88 | 0.50 | 0.36 |
| CR003390 | 15.97 | 3.86 | 15.80 | 3.99 | 0.23 | 0.15 |
| CR003391 | 29.77 | 3.85 | 29.57 | 3.85 | 0.27 | 0.06 |
| CR003392 | 4.13 | 1.21 | 4.00 | 1.15 | 0.17 | 0.06 |
| CR005298 | 39.90 | 2.92 | 22.37 | 3.04 | 17.57 | 0.42 |
| CR005299 | 8.65 | 0.78 | 8.30 | 0.99 | 0.35 | 0.21 |
| CR005300 | 57.47 | 1.69 | 53.47 | 1.86 | 4.10 | 0.92 |
| CR005301 | 25.37 | 1.65 | 24.00 | 2.26 | 1.60 | 0.82 |
| CR005302 | 61.10 | 5.20 | 60.10 | 4.77 | 1.00 | 0.46 |
| CR005303 | 53.57 | 8.52 | 53.07 | 8.36 | 0.53 | 0.47 |
| CR005304 | 67.00 | 5.80 | 5.53 | 1.37 | 61.63 | 6.98 |
| CR005305 | 3.83 | 0.78 | 3.53 | 0.61 | 0.40 | 0.17 |
| CR005306 | 9.43 | 1.63 | 8.07 | 2.17 | 1.37 | 0.72 |
| CR005307 | 8.17 | 1.20 | 5.20 | 0.87 | 3.00 | 0.82 |

[0774] Table 10 shows the average and standard deviation for % Edit, % Insertion (Ins), and % Deletion (Del) for the tested FIR and control dgRNAs transfected with Spy Cas9 protein (RNP) in primary human hepatocytes.

TABLE 10
TTR editing data in primary human hepatocytes
transfected with Spy Cas9 loaded with dgRNAs

| | Avg | Std | Avg | Std | Avg | Std |
|---|---|---|---|---|---|---|
| | % | Dev % | % | Dev % | % | Dev % |
| GUIDE ID | Edit | Edit | Insert | Insert | Deletion | Deletion |
| CR001261 | 32.51 | 1.00 | 12.50 | 0.47 | 20.01 | 0.59 |
| CR001262 | 50.09 | 1.48 | 45.25 | 1.69 | 4.83 | 0.31 |
| CR001263 | 15.25 | 2.41 | 14.83 | 2.37 | 0.42 | 0.10 |
| CR001264 | 45.30 | 3.48 | 23.87 | 2.09 | 21.43 | 1.68 |
| CR003335 | 51.14 | 4.27 | 49.51 | 4.04 | 1.63 | 0.25 |
| CR003336 | 30.70 | 2.41 | 30.11 | 2.48 | 0.58 | 0.11 |
| CR003337 | 49.43 | 4.75 | 47.54 | 4.49 | 1.88 | 0.47 |
| CR003338 | 61.34 | 3.55 | 59.13 | 3.44 | 2.22 | 0.11 |
| CR003339 | 45.06 | 9.83 | 8.85 | 1.65 | 36.21 | 8.34 |
| CR003340 | 10.44 | 2.44 | 5.94 | 1.34 | 4.50 | 1.16 |
| CR003341 | 19.66 | 3.67 | 14.64 | 3.31 | 5.02 | 0.37 |
| CR003342 | 20.66 | 2.55 | 19.85 | 2.54 | 0.81 | 0.15 |
| CR003343 | 43.25 | 4.47 | 41.61 | 4.26 | 1.63 | 0.33 |
| CR003344 | 35.45 | 13.12 | 30.97 | 11.72 | 4.48 | 1.51 |
| CR003345 | 28.90 | 6.33 | 21.00 | 5.23 | 7.91 | 1.81 |
| CR003346 | 4.11 | 1.36 | 2.27 | 0.53 | 1.84 | 0.85 |
| CR003347 | 66.35 | 4.48 | 66.11 | 4.51 | 0.24 | 0.08 |
| CR003348 | 23.18 | 2.16 | 13.74 | 1.17 | 9.44 | 0.99 |
| CR003349 | 10.83 | 1.57 | 9.00 | 1.41 | 1.83 | 0.32 |
| CR003350 | 24.84 | 2.74 | 19.77 | 1.91 | 5.07 | 0.89 |
| CR003351 | 40.28 | 1.31 | 23.92 | 0.70 | 16.36 | 0.78 |
| CR003352 | 30.48 | 1.93 | 27.27 | 2.31 | 3.21 | 0.38 |
| CR003353 | 61.54 | 4.13 | 59.38 | 4.04 | 2.16 | 0.11 |
| CR003354 | 10.31 | 1.47 | 10.07 | 1.50 | 0.23 | 0.11 |
| CR003355 | 19.11 | 0.92 | 17.69 | 0.79 | 1.42 | 0.44 |
| CR003356 | 7.53 | 1.78 | 6.24 | 1.51 | 1.29 | 0.32 |
| CR003357 | 49.35 | 2.53 | 48.45 | 2.54 | 0.90 | 0.13 |
| CR003358 | 31.62 | 5.97 | 25.95 | 5.03 | 5.67 | 1.04 |
| CR003359 | 59.47 | 6.05 | 50.96 | 5.69 | 8.51 | 0.54 |
| CR003360 | 31.47 | 4.12 | 30.27 | 4.21 | 1.19 | 0.22 |
| CR003361 | 13.08 | 1.48 | 12.52 | 1.45 | 0.56 | 0.18 |
| CR003362 | 11.65 | 1.24 | 11.10 | 1.06 | 0.56 | 0.36 |
| CR003363 | 27.65 | 2.84 | 21.47 | 2.39 | 6.18 | 0.61 |
| CR003364 | 35.29 | 3.50 | 23.93 | 2.63 | 11.36 | 1.16 |
| CR003365 | 47.78 | 3.67 | 40.24 | 3.12 | 7.54 | 0.72 |
| CR003366 | 42.74 | 3.41 | 37.95 | 2.88 | 4.79 | 0.60 |
| CR003367 | 31.19 | 4.60 | 16.06 | 2.66 | 15.13 | 1.94 |
| CR003368 | 34.83 | 5.05 | 33.83 | 5.09 | 1.00 | 0.10 |
| CR003369 | 12.98 | 0.26 | 11.67 | 0.21 | 1.31 | 0.11 |
| CR003370 | 20.06 | 1.79 | 18.80 | 1.65 | 1.26 | 0.28 |
| CR003371 | 18.80 | 2.73 | 17.23 | 2.34 | 1.57 | 0.43 |
| CR003372 | 17.56 | 2.26 | 15.74 | 2.16 | 1.81 | 0.10 |
| CR003373 | 3.64 | 0.29 | 3.44 | 0.30 | 0.19 | 0.07 |
| CR003374 | 2.65 | 0.33 | 2.52 | 0.33 | 0.14 | 0.02 |
| CR003375 | 5.04 | 0.66 | 4.93 | 0.66 | 0.11 | 0.01 |
| CR003376 | 5.00 | 1.10 | 4.86 | 1.10 | 0.14 | 0.03 |
| CR003377 | 12.77 | 2.00 | 12.45 | 1.84 | 0.31 | 0.18 |
| CR003378 | 8.66 | 1.90 | 8.24 | 1.74 | 0.42 | 0.19 |
| CR003379 | 16.86 | 2.62 | 16.51 | 2.62 | 0.34 | 0.08 |
| CR003380 | 8.17 | 1.42 | 7.71 | 1.47 | 0.46 | 0.10 |
| CR003381 | 7.15 | 0.73 | 6.88 | 0.67 | 0.27 | 0.07 |
| CR003382 | 2.44 | 0.06 | 2.28 | 0.05 | 0.15 | 0.03 |
| CR003383 | 4.76 | 0.40 | 4.52 | 0.42 | 0.24 | 0.09 |
| CR003384 | 3.56 | 0.26 | 3.39 | 0.26 | 0.17 | 0.01 |
| CR003385 | 41.15 | 6.06 | 38.15 | 5.59 | 3.00 | 0.48 |
| CR003386 | 3.22 | 0.25 | 2.97 | 0.27 | 0.25 | 0.02 |
| CR003387 | 1.79 | 0.11 | 1.68 | 0.09 | 0.11 | 0.04 |
| CR003388 | 5.43 | 1.03 | 4.38 | 1.00 | 1.05 | 0.25 |
| CR003389 | 19.87 | 4.39 | 19.19 | 4.52 | 0.68 | 0.24 |
| CR003390 | 16.09 | 2.84 | 15.85 | 2.91 | 0.24 | 0.09 |
| CR003391 | 34.72 | 8.29 | 34.46 | 8.35 | 0.26 | 0.06 |
| CR003392 | 10.07 | 1.06 | 9.93 | 1.02 | 0.14 | 0.04 |
| CR005298 | 32.07 | 1.02 | 21.12 | 1.02 | 10.95 | 0.15 |
| CR005299 | 19.37 | 0.61 | 18.79 | 0.51 | 0.58 | 0.13 |
| CR005300 | 57.23 | 6.24 | 53.62 | 5.44 | 3.61 | 0.87 |
| CR005301 | 31.37 | 3.02 | 29.53 | 2.88 | 1.84 | 0.15 |
| CR005302 | 48.29 | 5.22 | 47.32 | 5.32 | 0.97 | 0.14 |
| CR005303 | 36.45 | 4.83 | 36.06 | 4.72 | 0.39 | 0.12 |
| CR005304 | 49.45 | 6.85 | 4.32 | 0.31 | 45.13 | 6.74 |
| CR005305 | 7.07 | 1.43 | 6.73 | 1.30 | 0.34 | 0.17 |
| CR005306 | 18.81 | 1.82 | 16.24 | 1.57 | 2.57 | 0.35 |
| CR005307 | 18.73 | 1.68 | 10.18 | 0.92 | 8.55 | 0.88 |

[0775] Table 11 shows the average and standard deviation for % Edit, % Insertion (Ins), and % Deletion (Del) for the tested FIR and control dgRNAs co-transfected with Spy Cas9 mRNA (SEQ ID NO. 2) in primary human hepatocytes.

TABLE 11
TTR editing data in primary human hepatocytes
transfected with Spy Cas9 mRNA and dgRNAs

| | Avg | Std | Avg | Std | Avg | Std |
|---|---|---|---|---|---|---|
| | % | Dev % | % | Dev % | % | Dev % |
| GUIDE ID | Edit | Edit | Insert | Insert | Deletion | Deletion |
| CR001261 | 32.33 | 4.95 | 5.83 | 1.63 | 26.47 | 3.30 |
| CR001262 | 41.50 | 4.71 | 34.43 | 3.31 | 7.13 | 1.42 |
| CR001263 | 10.23 | 3.61 | 9.40 | 3.20 | 0.90 | 0.44 |
| CR001264 | 42.80 | 0.50 | 11.90 | 1.32 | 30.90 | 1.80 |
| CR003335 | 36.43 | 2.98 | 33.03 | 2.31 | 3.40 | 0.70 |
| CR003336 | 16.93 | 3.78 | 16.20 | 3.41 | 0.80 | 0.44 |
| CR003337 | 19.30 | 1.57 | 18.10 | 1.44 | 1.23 | 0.15 |
| CR003338 | 36.30 | 9.55 | 33.73 | 9.27 | 2.73 | 0.49 |
| CR003339 | 36.43 | 1.21 | 2.27 | 0.15 | 34.23 | 1.31 |
| CR003340 | 24.97 | 2.78 | 1.83 | 0.23 | 23.17 | 2.66 |
| CR003341 | 15.83 | 1.38 | 6.80 | 0.53 | 9.07 | 0.81 |
| CR003342 | 22.10 | 1.27 | 20.60 | 0.57 | 1.50 | 0.71 |
| CR003343 | 55.03 | 0.38 | 52.40 | 0.53 | 2.60 | 0.44 |
| CR003344 | 31.50 | 1.30 | 22.40 | 1.31 | 9.20 | 0.10 |
| CR003345 | 50.65 | 2.90 | 32.30 | 1.56 | 18.45 | 1.20 |
| CR003346 | 19.97 | 1.94 | 5.63 | 0.55 | 14.33 | 1.72 |
| CR003347 | 41.47 | 3.59 | 41.33 | 3.63 | 0.17 | 0.06 |
| CR003348 | 18.00 | 0.87 | 2.30 | 0.66 | 15.80 | 0.61 |
| CR003349 | 2.57 | 0.81 | 0.90 | 0.35 | 1.70 | 0.46 |
| CR003350 | 26.63 | 4.25 | 16.33 | 2.45 | 10.33 | 1.75 |
| CR003351 | 26.50 | 1.61 | 10.20 | 0.92 | 16.37 | 0.97 |
| CR003352 | 16.80 | 5.03 | 11.73 | 3.86 | 5.07 | 1.14 |
| CR003353 | 53.73 | 6.01 | 49.50 | 5.82 | 4.43 | 0.75 |
| CR003354 | 2.97 | 0.95 | 2.87 | 0.85 | 0.13 | 0.12 |
| CR003355 | 12.07 | 2.61 | 10.47 | 2.08 | 1.63 | 0.59 |
| CR003356 | 7.27 | 0.72 | 4.70 | 0.53 | 2.67 | 0.21 |
| CR003357 | 25.93 | 4.55 | 25.30 | 4.22 | 0.63 | 0.35 |
| CR003358 | 3.90 | 0.79 | 2.73 | 0.45 | 1.17 | 0.51 |
| CR003359 | 32.93 | 4.34 | 25.67 | 3.25 | 7.33 | 1.24 |
| CR003360 | 14.90 | 4.85 | 14.13 | 4.66 | 0.90 | 0.52 |
| CR003361 | 3.53 | 0.60 | 2.73 | 0.55 | 0.87 | 0.15 |
| CR003362 | 6.60 | 1.47 | 6.17 | 1.45 | 0.47 | 0.21 |
| CR003363 | 16.70 | 1.08 | 11.80 | 0.79 | 4.93 | 0.60 |
| CR003364 | 15.63 | 2.45 | 6.73 | 0.81 | 8.93 | 1.70 |
| CR003365 | 26.90 | 3.05 | 20.23 | 2.02 | 6.67 | 1.16 |
| CR003366 | 24.53 | 1.26 | 20.47 | 1.45 | 4.07 | 0.23 |
| CR003367 | 37.33 | 1.40 | 14.03 | 0.40 | 23.37 | 1.25 |
| CR003368 | 11.10 | 1.91 | 10.53 | 1.90 | 0.60 | 0.10 |
| CR003369 | 1.60 | 0.46 | 0.90 | 0.20 | 0.70 | 0.36 |
| CR003370 | 2.83 | 0.57 | 2.33 | 0.40 | 0.50 | 0.17 |
| CR003371 | 3.40 | 0.80 | 2.67 | 0.75 | 0.73 | 0.15 |
| CR003372 | 1.77 | 0.75 | 1.13 | 0.57 | 0.63 | 0.23 |
| CR003373 | 1.40 | 0.36 | 1.00 | 0.35 | 0.37 | 0.12 |
| CR003374 | 0.27 | 0.21 | 0.27 | 0.21 | 0.03 | 0.06 |
| CR003375 | 1.27 | 0.64 | 1.23 | 0.58 | 0.03 | 0.06 |
| CR003376 | 2.83 | 0.81 | 2.73 | 0.81 | 0.13 | 0.06 |
| CR003377 | 17.53 | 6.35 | 16.97 | 6.11 | 0.57 | 0.25 |
| CR003378 | 9.80 | 1.37 | 8.50 | 1.21 | 1.37 | 0.15 |
| CR003379 | 13.20 | 1.18 | 12.00 | 1.05 | 1.27 | 0.15 |
| CR003380 | 2.93 | 0.58 | 2.47 | 0.57 | 0.47 | 0.15 |
| CR003381 | 4.07 | 1.21 | 3.33 | 0.96 | 0.73 | 0.25 |
| CR003382 | 0.97 | 0.25 | 0.97 | 0.25 | 0.00 | 0.00 |
| CR003383 | 15.70 | 3.22 | 2.07 | 0.35 | 13.70 | 2.82 |
| CR003384 | 1.70 | 0.62 | 1.50 | 0.56 | 0.20 | 0.10 |
| CR003385 | 36.77 | 0.70 | 33.23 | 0.74 | 3.60 | 0.26 |
| CR003386 | 8.27 | 1.63 | 8.20 | 1.57 | 0.13 | 0.06 |
| CR003387 | 7.87 | 1.58 | 7.80 | 1.64 | 0.03 | 0.06 |
| CR003388 | 12.97 | 1.30 | 11.87 | 1.21 | 1.17 | 0.25 |
| CR003389 | 44.27 | 1.72 | 41.47 | 1.59 | 2.83 | 0.15 |
| CR003390 | 20.23 | 2.08 | 18.73 | 1.92 | 1.60 | 0.17 |
| CR003391 | 15.47 | 5.87 | 15.20 | 5.72 | 0.30 | 0.10 |
| CR003392 | 2.43 | 0.55 | 2.37 | 0.59 | 0.07 | 0.06 |
| CR005298 | 15.70 | 2.79 | 4.13 | 0.87 | 11.60 | 2.00 |
| CR005299 | 9.43 | 0.68 | 8.93 | 0.68 | 0.60 | 0.00 |
| CR005300 | 31.53 | 3.44 | 27.60 | 2.77 | 3.97 | 0.76 |
| CR005301 | 6.77 | 1.44 | 5.47 | 0.96 | 1.40 | 0.61 |
| CR005302 | 34.80 | 7.17 | 33.67 | 7.01 | 1.13 | 0.21 |
| CR005303 | 35.50 | 5.90 | 35.00 | 5.81 | 0.50 | 0.10 |
| CR005304 | 45.27 | 4.71 | 0.83 | 0.15 | 44.47 | 4.57 |
| CR005305 | 7.53 | 1.06 | 5.93 | 1.10 | 1.60 | 0.10 |
| CR005306 | 9.97 | 0.38 | 7.13 | 0.23 | 2.87 | 0.12 |
| CR005307 | 12.90 | 2.43 | 3.67 | 0.61 | 9.30 | 1.80 |

[0776] Table 12 shows the average and standard deviation for % Edit, % Insertion (Ins), and % Deletion (Del) for the tested FIR dgRNAs electroporated with Spy Cas9 protein (RNP) in primary cyno hepatocytes.

TABLE 12
TTR editing data in primary cyno hepatocytes electroporated
with Spy Cas9 protein and dgRNAs

| | Avg | Std | Avg | Std | Avg | Std |
|---|---|---|---|---|---|---|
| | % | Dev % | % | Dev % | % | Dev % |
| GUIDE ID | Edit | Edit | Insert | Insert | Deletion | Deletion |
| CR003336 | 8.18 | 1.93 | 8.10 | 1.94 | 0.07 | 0.01 |
| CR003337 | 24.94 | 5.80 | 24.10 | 4.71 | 0.84 | 1.10 |
| CR003338 | 44.94 | 9.99 | 44.89 | 9.97 | 0.05 | 0.01 |
| CR003339 | 8.95 | 0.89 | 4.93 | 0.64 | 4.02 | 0.25 |
| CR003340 | 12.53 | 2.22 | 7.72 | 0.13 | 4.80 | 2.09 |
| CR003341 | 8.43 | 10.53 | 7.66 | 9.91 | 0.77 | 0.63 |
| CR003344 | 35.72 | 4.67 | 33.81 | 5.29 | 1.91 | 0.61 |
| CR003345 | 52.92 | 3.26 | 30.74 | 0.78 | 22.19 | 2.48 |
| CR003346 | 1.91 | 0.86 | 1.82 | 0.82 | 0.09 | 0.04 |
| CR003347 | 72.41 | 0.38 | 72.15 | 0.73 | 0.25 | 0.34 |
| CR003352 | 1.25 | 0.20 | 1.16 | 0.21 | 0.09 | 0.01 |
| CR003353 | 4.75 | 0.43 | 4.67 | 0.47 | 0.08 | 0.04 |
| CR003358 | 20.47 | 0.30 | 19.01 | 0.51 | 1.46 | 0.21 |
| CR003359 | 46.17 | 1.14 | 40.66 | 2.00 | 5.51 | 0.86 |
| CR003360 | 29.47 | 0.63 | 29.05 | 1.00 | 0.42 | 0.37 |
| CR003361 | 4.53 | 0.14 | 4.46 | 0.18 | 0.08 | 0.04 |
| CR003362 | 4.59 | 0.80 | 4.36 | 0.77 | 0.22 | 0.03 |
| CR003363 | 15.64 | 1.92 | 13.24 | 2.65 | 2.39 | 0.73 |
| CR003364 | 19.62 | 2.54 | 14.27 | 2.72 | 5.35 | 0.17 |
| CR003365 | 10.31 | 1.81 | 9.33 | 1.80 | 0.97 | 0.01 |
| CR003366 | 18.52 | 0.71 | 17.62 | 0.33 | 0.90 | 0.39 |
| CR003368 | 18.56 | 3.89 | 18.30 | 3.77 | 0.26 | 0.11 |
| CR003369 | 1.53 | 0.25 | 1.28 | 0.40 | 0.25 | 0.15 |
| CR003370 | 2.52 | 0.64 | 2.40 | 0.63 | 0.12 | 0.01 |
| CR003371 | 1.83 | 0.38 | 1.69 | 0.41 | 0.14 | 0.03 |
| CR003372 | 2.15 | 0.30 | 1.83 | 0.33 | 0.32 | 0.04 |
| CR003382 | 10.86 | 2.04 | 8.54 | 1.93 | 2.33 | 0.11 |
| CR003383 | 8.86 | 2.30 | 4.31 | 0.69 | 4.55 | 1.61 |
| CR003384 | 3.75 | 0.35 | 2.50 | 0.37 | 1.25 | 0.02 |
| CR003385 | 30.96 | 1.61 | 26.84 | 2.20 | 4.12 | 0.59 |
| CR003386 | 5.54 | 1.42 | 3.51 | 1.26 | 2.03 | 0.15 |
| CR003387 | 4.72 | 0.03 | 4.55 | 0.08 | 0.17 | 0.11 |
| CR003388 | 6.81 | 0.17 | 6.59 | 0.28 | 0.22 | 0.11 |
| CR003389 | 18.83 | 4.99 | 18.05 | 4.92 | 0.78 | 0.07 |
| CR003390 | 16.87 | 3.88 | 16.49 | 3.48 | 0.39 | 0.39 |
| CR003391 | 36.44 | 1.09 | 35.73 | 1.37 | 0.71 | 0.28 |
| CR003392 | 7.02 | 0.97 | 6.63 | 0.59 | 0.38 | 0.37 |
| CR005299 | 13.48 | 2.96 | 13.23 | 2.74 | 0.26 | 0.22 |
| CR005301 | 46.76 | 1.75 | 46.34 | 2.19 | 0.42 | 0.44 |
| CR005302 | 1.34 | 0.19 | 1.26 | 0.19 | 0.08 | 0.00 |
| CR005303 | 59.28 | 1.05 | 58.72 | 1.06 | 0.56 | 0.00 |
| CR005305 | 11.28 | 0.39 | 11.13 | 0.39 | 0.15 | 0.00 |
| CR005307 | 4.56 | 0.71 | 2.01 | 0.49 | 2.55 | 0.21 |

[0777] Table 13 shows the average and standard deviation for % Edit, % Insertion (Ins), and % Deletion (Del) for the tested cyno specific TTR dgRNAs electroporated with Spy Cas9 protein (RNP) on primary cyno hepatocytes.

TABLE 13
TTR editing data in primary cyno hepatocytes electroporated
with Spy Cas9 protein and cyno specific dgRNAs

| | Avg | Std | Avg | Std | Avg | Std |
|---|---|---|---|---|---|---|
| | % | Dev % | % | Dev % | % | Dev % |
| GUIDE ID | Edit | Edit | Insert | Insert | Deletion | Deletion |
| CR000689 | 24.41 | 1.67 | 18.11 | 2.41 | 6.30 | 0.93 |
| CR005364 | 27.70 | 0.74 | 0.58 | 0.29 | 27.11 | 0.60 |
| CR005365 | 64.94 | 2.03 | 0.10 | 0.04 | 64.85 | 2.05 |
| CR005366 | 77.00 | 1.17 | 0.33 | 0.27 | 76.67 | 0.99 |
| CR005367 | 50.79 | 0.53 | 0.53 | 0.25 | 50.26 | 0.36 |
| CR005368 | 27.60 | 2.07 | 0.33 | 0.45 | 27.27 | 2.32 |
| CR005369 | 42.01 | 0.33 | 8.09 | 0.55 | 33.92 | 0.31 |
| CR005370 | 63.52 | 3.21 | 0.59 | 0.33 | 62.93 | 2.88 |
| CR005371 | 8.42 | 0.69 | 0.31 | 0.12 | 8.10 | 0.57 |
| CR005372 | 17.98 | 1.39 | 0.83 | 0.77 | 17.16 | 0.71 |

### Example 3. Screening of sgRNA Sequences

[0778] Cross Screening of TTR sgRNAs in Multiple Cell Types

[0779] Guides in modified sgRNA format targeting human and/or cyno TTR were delivered to primary human hepatocytes and primary cyno hepatocytes as described in Example 1. Percent editing was determined for crRNAs comprising each guide sequence across each cell type and the guide sequences were then rank ordered based on highest % edit. The screening data for the guide sequences in Table 2 in both cell lines are listed below (Table 14 through 16).

[0780] Table 14 shows the average and standard deviation for % Edit, % Insertion (Ins), and % Deletion (Del) for the tested TTR sgRNAs transfected with Spy Cas9 protein (RNP) in primary human hepatocytes.

TABLE 14
TTR editing data in primary human hepatocytes
transfected with Spy Cas9 protein and sgRNAs

| | Avg | Std | Avg | Std | Avg | Std |
|---|---|---|---|---|---|---|
| | % | Dev % | % | Dev % | % | Dev % |
| GUIDE ID | Edit | Edit | Insert | Insert | Deletion | Deletion |
| G000480 | 81.80 | 1.98 | 77.15 | 2.19 | 4.70 | 0.28 |
| G000481 | 46.90 | 1.71 | 27.77 | 3.88 | 19.43 | 4.76 |
| G000482 | 66.67 | 2.35 | 56.57 | 4.14 | 10.10 | 1.85 |
| G000483 | 47.90 | 6.56 | 19.57 | 3.37 | 28.50 | 3.25 |
| G000484 | 62.97 | 0.90 | 29.23 | 0.21 | 33.83 | 0.95 |
| G000485 | 56.07 | 3.37 | 53.07 | 2.84 | 3.13 | 0.60 |
| G000486 | 69.73 | 6.86 | 9.83 | 1.93 | 59.93 | 5.63 |
| G000487 | 67.30 | 2.75 | 65.27 | 3.41 | 2.07 | 1.06 |
| G000488 | 61.27 | 1.95 | 26.30 | 1.55 | 35.00 | 1.30 |
| G000489 | 60.17 | 2.75 | 51.07 | 3.18 | 9.43 | 0.45 |
| G000490 | 55.90 | 7.88 | 46.13 | 7.55 | 9.80 | 0.69 |
| G000491 | 74.30 | 1.55 | 70.27 | 2.37 | 4.33 | 0.72 |
| G000492 | 60.97 | 5.81 | 57.90 | 4.64 | 3.13 | 1.35 |
| G000493 | 41.40 | 3.08 | 38.90 | 3.29 | 2.67 | 0.35 |
| G000494 | 62.23 | 3.30 | 61.47 | 3.25 | 0.77 | 0.31 |
| G000495 | 50.80 | 1.85 | 45.80 | 1.25 | 5.37 | 0.64 |
| G000496 | 72.33 | 1.63 | 44.73 | 2.14 | 27.67 | 1.46 |
| G000497 | 59.67 | 1.40 | 51.10 | 1.14 | 8.73 | 0.71 |
| G000498 | 72.80 | 3.75 | 60.17 | 3.12 | 12.70 | 0.72 |
| G000499 | 66.40 | 3.55 | 65.23 | 3.72 | 1.17 | 0.38 |
| G000500 | 65.53 | 1.21 | 62.00 | 1.11 | 3.83 | 0.40 |
| G000501 | 60.93 | 1.91 | 55.13 | 1.43 | 6.00 | 0.56 |

[0781] Table 15 shows the average and standard deviation at 12.5 nM for % Edit, % Insertion (Ins), and % Deletion (Del) for the tested FIR sgRNAs co-transfected with Spy Cas9 mRNA (SEQ ID NO:2) in primary human hepatocytes.

TABLE 15
TTR editing data in primary human hepatocytes
transfected with Spy Cas9 mRNA and sgRNAs

| | Avg | Std | Avg | Std | Avg | Std |
|---|---|---|---|---|---|---|
| | % | Dev % | % | Dev % | % | Dev % |
| GUIDE ID | Edit | Edit | Insert | Insert | Deletion | Deletion |
| G000480 | 73.28 | 0.61 | 59.85 | 0.13 | 13.47 | 0.51 |
| G000481 | 34.30 | 5.26 | 14.62 | 2.59 | 19.77 | 2.72 |
| G000482 | 40.93 | 3.95 | 27.70 | 2.92 | 13.25 | 0.97 |
| G000483 | 27.82 | 2.93 | 4.05 | 0.51 | 23.85 | 2.43 |
| G000484 | 43.37 | 6.79 | 13.98 | 2.61 | 29.48 | 4.15 |
| G000485 | 30.82 | 5.76 | 28.87 | 5.50 | 1.97 | 0.28 |
| G000486 | 59.13 | 5.62 | 2.82 | 0.86 | 56.37 | 4.92 |
| G000487 | 49.57 | 0.99 | 47.38 | 0.89 | 2.27 | 0.24 |
| G000488 | 49.40 | 5.05 | 11.98 | 1.40 | 37.48 | 3.68 |
| G000489 | 24.25 | 2.82 | 14.17 | 2.01 | 10.28 | 1.38 |
| G000490 | 24.72 | 2.35 | 19.38 | 2.04 | 5.38 | 0.41 |
| G000491 | 45.93 | 1.22 | 42.42 | 1.06 | 3.60 | 0.33 |
| G000492 | 34.65 | 2.21 | 32.45 | 2.01 | 2.22 | 0.25 |
| G000493 | 11.55 | 1.35 | 10.65 | 1.58 | 0.97 | 0.30 |
| G000494 | 26.22 | 4.03 | 25.17 | 3.89 | 1.07 | 0.15 |
| G000495 | 47.77 | 1.88 | 43.40 | 1.91 | 4.45 | 0.17 |
| G000496 | 63.30 | 2.60 | 11.08 | 2.10 | 52.25 | 0.67 |
| G000497 | 40.33 | 3.32 | 34.48 | 2.71 | 5.85 | 0.61 |
| G000498 | 60.02 | 5.42 | 45.20 | 4.34 | 14.90 | 1.08 |
| G000499 | 39.30 | 6.04 | 38.58 | 5.86 | 0.77 | 0.12 |
| G000500 | 35.50 | 0.61 | 32.47 | 0.49 | 3.10 | 0.18 |
| G000501 | 40.32 | 1.50 | 33.82 | 2.04 | 6.62 | 0.55 |
| G000567 | 27.28 | 7.59 | 17.35 | 4.72 | 10.02 | 2.94 |
| G000568 | 43.75 | 5.83 | 43.00 | 5.81 | 0.80 | 0.18 |
| G000570 | 68.42 | 3.64 | 68.08 | 3.61 | 0.35 | 0.00 |
| G000571 | 20.47 | 3.41 | 14.47 | 2.72 | 6.13 | 0.78 |
| G000572 | 55.42 | 8.13 | 41.62 | 6.48 | 13.85 | 1.60 |

[0782] Table 16 shows the average and standard deviation for % Edit, % Insertion (Ins), and % Deletion (Del) for the tested FIR sgRNAs electroporated with Spy Cas9 protein (RNP) on primary cyno hepatocytes. Note that guides G000480 and G000488 have one mismatch to cyno, which may compromise their editing efficiency in cyno cells.

TABLE 16
TTR editing data in primary cyno hepatocytes electroporated
with Spy Cas9 protein and sgRNAs

| | Avg | Std | Avg | Std | Avg | Std |
|---|---|---|---|---|---|---|
| | % | Dev % | % | Dev % | % | Dev % |
| GUIDE ID | Edit | Edit | Insert | Insert | Deletion | Deletion |
| G000480 | 10.20 | 0.56 | 9.83 | 0.81 | 0.37 | 0.25 |
| G000481 | 69.13 | 8.62 | 33.73 | 2.67 | 35.50 | 11.23 |
| G000482 | 75.17 | 2.34 | 55.23 | 2.00 | 20.03 | 0.85 |
| G000485 | 22.93 | 0.95 | 22.00 | 0.82 | 1.07 | 0.21 |
| G000486 | 79.90 | 0.79 | 11.90 | 0.85 | 68.07 | 0.35 |
| G000488 | 9.63 | 0.50 | 5.37 | 0.38 | 4.27 | 0.35 |
| G000489 | 67.53 | 1.15 | 53.53 | 1.56 | 14.17 | 0.64 |
| G000490 | 61.67 | 0.72 | 54.47 | 1.10 | 7.27 | 1.23 |
| G000491 | 66.20 | 1.11 | 64.37 | 0.47 | 1.90 | 0.70 |
| G000493 | 50.13 | 0.74 | 48.07 | 1.69 | 2.10 | 0.98 |
| G000494 | 81.53 | 0.71 | 79.57 | 0.49 | 2.07 | 0.67 |
| G000498 | 91.37 | 1.48 | 68.50 | 1.64 | 22.87 | 1.50 |
| G000499 | 83.40 | 0.36 | 82.00 | 0.20 | 1.43 | 0.55 |
| G000500 | 45.20 | 3.66 | 42.60 | 3.80 | 2.63 | 0.25 |

[0783] Table 17 shows the average and standard deviation for % Edit, % Insertion (Ins), and % Deletion (Del) for the tested cyno specific TTR sgRNAs electroporated with Spy Cas9 protein (RNP) on primary cyno hepatocytes.

TABLE 17
TTR editing data in primary cyno hepatocytes electroporated
with Spy Cas9 protein and cyno specific sgRNAs (e.g.,
those having an analogous human gRNA, See Table 3)

| | Avg | Std | Avg | Std | Avg | Std |
|---|---|---|---|---|---|---|
| | % | Dev % | % | Dev % | % | Dev % |
| GUIDE ID | Edit | Edit | Insert | Insert | Deletion | Deletion |
| G000502 | 95.10 | 0.96 | 13.97 | 1.69 | 81.27 | 2.60 |
| G000503 | 58.53 | 2.40 | 52.07 | 1.68 | 6.50 | 2.46 |
| G000504 | 77.17 | 0.96 | 69.73 | 1.29 | 7.53 | 0.57 |
| G000505 | 95.53 | 1.06 | 95.50 | 1.01 | 0.10 | 0.10 |
| G000506 | 89.43 | 1.36 | 86.90 | 1.64 | 3.07 | 0.42 |
| G000507 | 71.17 | 3.22 | 67.03 | 2.39 | 4.60 | 1.65 |
| G000508 | 45.63 | 3.01 | 41.57 | 2.95 | 4.17 | 0.91 |
| G000509 | 93.03 | 0.81 | 43.60 | 1.30 | 49.73 | 1.76 |
| G000510 | 90.80 | 0.53 | 89.13 | 0.40 | 1.77 | 0.12 |
| G000511 | 62.77 | 1.63 | 60.87 | 1.55 | 2.00 | 0.35 |

### Example 4. Screening of Lipid Nanoparticle (LNP) Formulations Containing Spy Ca9 mRNA and sgRNA

[0784] Cross screening of LNP formulated TTR sgRNAs with Spy Cas9 mRNA in primary human hepatocytes and primary cyno hepatocytes.

[0785] Lipid nanoparticle formulations of modified sgRNAs targeting human TTR and the cyno matched sgRNA sequences were tested on primary human hepatocytes and primary cyno hepatocytes in a dose response curve. Primary human and cyno hepatocytes were plated as described in Example 1. Both cell lines were incubated at 37° C., 5% CO₂ for 24 hours prior to treatment with LNPs. The LNPs used in the experiments detailed in Tables 18-21 were prepared using the Nanoassemblr™ procedure, each containing the specified sgRNA and Cas9 mRNA (SEQ ID NO:2), each having Lipid. The LNPs contained Lipid A, Cholesterol, DSPC, and PEG2k-DMG in a 45:44:9:2 molar ratio, respectively, and had a N:P ratio of 4.5. LNPs were incubated in hepatocyte maintenance media containing 6% cyno serum at 37° C. for 5 minutes. Post incubation the LNPs were added onto the primary human or cyno hepatocytes in an 8 point 2-fold dose response curve starting at 100 ng mRNA. The cells were lysed 72 hours post treatment for NGS analysis as described in Example 1. Percent editing was determined for crRNAs comprising each guide sequence across each cell type and the guide sequences were then rank ordered based on highest % editing at 12.5 ng mRNA input and 3.9 nM guide concentration. The dose response curve data for the guide sequences in both cell lines is shown in FIGS. 4 through 7. The % editing at 12.5 ng mRNA input and 3.9 nM guide concentration are listed below (Table 16 through 18).

[0786] Table 18 shows the average and standard deviation at 12.5 ng of cas9 mRNA for % Edit, % Insertion (Ins), and % Deletion (Del) for the tested TTR sgRNAs formulated in lipid nanoparticles with Spy Cas9 mRNA on primary human hepatocytes as dose response curves. G000570 exhibited an uncharacteristic dose response curve compared to the other sgRNAs which may be an artifact of the experiment. The data are shown graphically in FIG. 4.

TABLE 18
TTR editing data in primary human hepatocytes treated with
LNP formulated Spy Cas9 mRNA (SEQ ID NO: 2) and sgRNAs

| | 12.5 ng mRNA, | Std |
|---|---|---|
| | 3.9 nM sgRNA, | Dev % |
| GUIDE ID | Avg % Edit | Edit |
| G000480 | 59.33 | 0.73 |
| G000481 | 24.37 | 0.37 |
| G000482 | 19.10 | 2.64 |
| G000483 | 7.37 | 0.67 |
| G000484 | 16.67 | 1.23 |
| G000485 | 14.23 | 2.36 |
| G000486 | 61.33 | 2.59 |
| G000487 | 17.37 | 0.95 |
| G000488 | 44.80 | 3.00 |
| G000489 | 16.85 | 0.06 |
| G000490 | 10.53 | 1.90 |
| G000491 | 31.60 | 2.33 |
| G000492 | 15.87 | 0.44 |
| G000493 | 7.33 | 0.73 |
| G000494 | 6.37 | 1.07 |
| G000495 | 23.97 | 1.66 |
| G000496 | 30.73 | 3.76 |
| G000497 | 15.10 | 3.30 |
| G000498 | 24.43 | 1.30 |
| G000499 | 16.07 | 1.67 |
| G000500 | 23.57 | 2.44 |
| G000501 | 32.30 | 2.49 |
| G000567 | 48.95 | 1.06 |
| G000568 | 54.60 | 3.68 |
| G000570 | 88.30 | 1.84 |
| G000572 | 55.45 | 1.20 |

[0787] Table 19 shows the average and standard deviation at 12.5 ng of mNRA and 3.9 nM guide concentration for % Edit, % Insertion (Ins), and % Deletion (Del) for the tested TTR sgRNAs formulated in lipid nanoparticles with Spy Cas9 mRNA on primary cyno hepatocytes as dose response curves. The data are shown graphically in FIG. 5.

TABLE 19
TTR editing data in primary cyno hepatocytes treated with
LNP formulated Spy Cas9 mRNA (SEQ ID NO: 2) and sgRNAs

| | 12.5 ng mRNA, | Std |
|---|---|---|
| | 3.9 nM sgRNA, | Dev % |
| GUIDE ID | Avg % Edit | Edit |
| G000480 | 0.73 | 0.15 |
| G000481 | 49.20 | 1.39 |
| G000482 | 26.13 | 5.33 |
| G000483 | 0.73 | 0.60 |
| G000484 | 0.10 | 0.00 |
| G000485 | 1.43 | 1.02 |
| G000489 | 31.87 | 2.40 |
| G000490 | 15.23 | 1.08 |
| G000491 | 6.37 | 0.38 |
| G000492 | 0.70 | 0.28 |
| G000493 | 7.63 | 1.14 |
| G000494 | 14.30 | 1.06 |
| G000495 | 0.73 | 0.06 |
| G000497 | 0.23 | 0.06 |
| G000498 | 37.90 | 1.42 |
| G000499 | 14.63 | 0.70 |
| G000500 | 10.47 | 0.32 |
| G000501 | 1.37 | 0.31 |
| G000567 | 0.10 | 0.00 |
| G000568 | 9.25 | 0.21 |
| G000570 | 17.30 | 0.85 |
| G000571 | 20.20 | 2.26 |
| G000572 | 30.60 | 0.42 |

[0788] Table 20 shows the average and standard deviation at 12.5 ng of mRNA and 3.9 nM guide concentration for % Edit, % Insertion (Ins), and % Deletion (Del) for the tested cyno specific TTR sgRNAs formulated in lipid nanoparticles with Spy Cas9 mRNA on primary cyno hepatocytes as dose response curves. The data are shown graphically in FIG. 6.

TABLE 20
TTR editing data in primary cyno hepatocytes
treated with LNP formulated Spy Cas9 mRNA
(SEQ ID NO: 2) and cyno matched sgRNAs

| | 12.5 ng mRNA, | Std |
|---|---|---|
| | 3.9 nM sgRNA, | Dev % |
| GUIDE ID | Avg % Edit | Edit |
| G000502 | 80.70 | 0.14 |
| G000506 | 60.13 | 0.70 |
| G000509 | 74.47 | 7.28 |
| G000510 | 61.87 | 2.54 |

Cross Screening of LNP Formulated TTR sgRNAs with Spy Cas9 mRNA in Primary Human Hepatocytes and Primary Cyno Hepatocytes

[0789] Lipid nanoparticle formulations of modified sgRNAs targeting human TTR and the cyno matched sgRNA sequences were tested on primary human hepatocytes and primary cyno hepatocytes in a dose response curve. Primary human and cyno hepatocytes were plated as described in Example 1. Both cell lines were incubated at 37° C., 5% CO₂ for 24 hours prior to treatment with LNPs. The LNPs used in the experiments detailed in Tables 20-22 were prepared using the cross-flow procedure described above but purified using PD-10 columns (GE Healthcare Life Sciences) and concentrated using Amicon centrifugal filter units (Millipore Sigma), each containing the specified sgRNA and Cas9 mRNA (SEQ ID NO:1). The LNPs contained Lipid A, Cholesterol, DSPC, and PEG2k-DMG in a 50:38:9:3 molar ratio, respectively, and had a N:P ratio of 6.0. LNPs were incubated in hepatocyte maintenance media containing 6% cyno serum at 37° C., 5% CO₂ for 5 minutes. Post incubation the LNPs were added onto the primary human or cyno hepatocytes in an 8 point 3-fold dose response curve starting at 300 ng mRNA. The cells were lysed 72 hours post treatment for NGS analysis as described in Example 1. Percent editing was determined for crRNAs comprising each guide sequence across each cell type and the guide sequences were then rank ordered based on EC50 values and maximum editing percent. The dose response curve data for the guide sequences in both cell lines is shown in FIGS. 4 through 7. The EC 50 values and maximum editing percent are listed below (Table 19 through 22).

[0790] Table 21 shows the EC50 and maximum editing the tested human specific TTR sgRNAs formulated in lipid nanoparticles with U-depleted Spy Cas9 mRNA on primary human hepatocytes as dose response curves. The data are shown graphically in FIG. 4.

TABLE 21
TTR editing data in primary human hepatocytes treated with
LNP formulated Spy Cas9 mRNA and human specific sgRNAs

| GUIDE ID | EC50 | Max Editing |
|---|---|---|
| G000480 | 0.10 | 98.69 |
| G000481 | 1.43 | 87.05 |
| G000482 | 0.65 | 97.02 |
| G000483 | 1.88 | 77.39 |
| G000484 | 0.95 | 94.14 |
| G000488 | 0.72 | 95.83 |
| G000489 | 1.38 | 86.33 |
| G000490 | 1.52 | 94.16 |
| G000493 | 2.42 | 63.95 |
| G000494 | 1.28 | 75.70 |
| G000499 | 0.63 | 96.31 |
| G000500 | 0.39 | 88.70 |
| G000568 | 0.78 | 95.72 |
| G000570 | 0.23 | 98.22 |
| G000571 | 2.21 | 71.28 |
| G000572 | 0.42 | 97.94 |

[0791] Table 22 shows the EC50 and maximum editing the tested human specific TTR sgRNAs formulated in lipid nanoparticles with U-depleted Spy Cas9 mRNA on primary cyno hepatocytes as dose response curves. The data are shown graphically in FIG. 16.

TABLE 22
TTR editing data in primary cyno hepatocytes treated with
LNP formulated Spy Cas9 mRNA and human specific sgRNAs

| GUIDE ID | EC50 | Max Editing |
|---|---|---|
| G000480 | 5.28 | 20.32 |
| G000481 | 0.93 | 95.07 |
| G000482 | 0.89 | 97.47 |
| G000483 | 4.40 | 56.52 |
| G000484 | 3.47 | 0.22 |
| G000488 | 11.56 | 21.63 |
| G000489 | 1.79 | 89.21 |
| G000490 | 3.09 | 90.76 |
| G000493 | 4.97 | 61.15 |
| G000494 | 2.77 | 60.84 |
| G000499 | 2.00 | 74.94 |
| G000500 | 4.42 | 58.04 |
| G000567 | 1.76 | 97.06 |
| G000568 | 1.87 | 87.93 |
| G000570 | 2.00 | 96.73 |
| G000571 | 1.55 | 97.03 |
| G000572 | 0.79 | 100.31 |
| G000504 | 5.16 | 7.16 |
| G000505 | 3.57 | 13.48 |
| G000506 | 1.26 | 89.49 |

[0792] Table 23 shows the EC50 and maximum editing the tested cyno matched TTR sgRNAs formulated in lipid nanoparticles with U-depleted Spy Cas9 mRNA on primary human hepatocytes as dose response curves. The data are shown graphically in FIG. 17.

TABLE 23
TTR editing data in primary human hepatocytes treated with
LNP formulated Spy Cas9 mRNA and cyno specific sgRNAs

| GUIDE ID | EC50 | Max Editing |
|---|---|---|
| G000502 | 0.70 | 91.5 |
| G000504 | 5.16 | 7.16 |
| G000505 | 3.57 | 13.48 |
| G000506 | 1.26 | 89.49 |

[0793] Table 24 shows the EC50 and maximum editing the tested cyno matched TTR sgRNAs formulated in lipid nanoparticles with U-depleted Spy Cas9 mRNA on primary cyno hepatocytes as dose response curves. The data are shown graphically in FIG. 18.

TABLE 24
TTR editing data in primary cyno hepatocytes treated with
LNP formulated Spy Cas9 mRNA and cyno specific sgRNAs

| GUIDE ID | EC50 | Max Editing |
|---|---|---|
| G000502 | 0.26 | 100.05 |
| G000503 | 2.26 | 83.41 |
| G000504 | 1.42 | 98.04 |
| G000505 | 1.10 | 99.97 |
| G000506 | 0.66 | 99.18 |

### Example 5. Off-Target Analysis of TTR dgRNAs and sgRNAs

### Off-Target Analysis of TTR Guides

[0794] An oligo insertion based assay (See, e.g., Tsai et al., Nature Biotechnology 33, 187-197; 2015) was used to determine potential off-target genomic sites cleaved by Cas9 targeting TTR. Forty-five dgRNAs from Table 1 (and two control guides with known off-target profiles) were screened in the HEK293_Cas9 cells. The human embryonic kidney adenocarcinoma cell line HEK293 constitutively expressing Spy Cas9 (“HEK293_Cas9”) was cultured in DMEM media supplemented with 10% fetal bovine serum and 500 μg/ml G418. Cells were plated at a density of 30,000 cells/well in a 96-well plate 24 hours prior to transfection. Cells were transfected with Lipofectamine RNAiMAX (ThermoFisher, Cat. 13778150) per the manufacturer's protocol. Cells were transfected with a lipoplex containing individual crRNA (15 nM), trRNA (15 nM), and donor oligo with (10 nM) Lipofectamine RNAiMAX (0.3 μL/well) and OptiMem. Cells were lysed 24 hours post transfection and genomic DNA was extracting using Zymo's Quick gDNA 96 Extraction kit (catalog #D3012) following the manufacturer's recommended protocol. The gDNA was quantified using the Qubit High Sensitivity dsDNA kit (Life Technologies). Libraries were prepared per the previously described method in Tsai et al, 2015 with minor modifications. Sequencing was performed on Illumina's MiSeq and HiSeq 2500. The assay identified potential off-target sites for some of the crRNAs which are plotted in FIG. 2.

[0795] Table 25 shows the number of off-target integration sites detected in HekCas9 cells transfected with TTR dgRNAs along with a double stranded DNA oligo donor sequence.

TABLE 25
Number of off-target integration sites detected
for TTR dgRNAs via an oligo insertion based assay

| GUIDE ID | # Sites |
|---|---|
| CR003335 | 0 |
| CR003336 | 2 |
| CR003337 | 10 |
| CR003338 | 2 |
| CR003339 | 3 |
| CR003340 | 0 |
| CR003342 | 0 |
| CR003343 | 2 |
| CR003344 | 0 |
| CR003345 | 0 |
| CR003346 | 0 |
| CR003347 | 1 |
| CR003348 | 3 |
| CR003351 | 1 |
| CR003352 | 2 |
| CR003353 | 2 |
| CR003355 | 1 |
| CR003356 | 4 |
| CR003357 | 3 |
| CR003359 | 6 |
| CR003360 | 0 |
| CR003363 | 4 |
| CR003365 | 3 |
| CR003366 | 1 |
| CR003367 | 1 |
| CR003368 | 2 |
| CR003369 | 2 |
| CR003377 | 0 |
| CR003380 | 0 |
| CR003382 | 34 |
| CR003383 | 1 |
| CR003385 | 3 |
| CR003386 | 1 |
| CR003387 | 6 |
| CR003388 | 2 |
| CR003389 | 2 |
| CR003390 | 1 |
| CR003391 | 0 |
| CR003392 | 0 |
| CR005298 | 0 |
| CR005300 | 0 |
| CR005301 | 0 |
| CR005302 | 1 |
| CR005303 | 1 |
| CR005304 | 0 |

[0796] Additionally, a subset of the guides was assessed for off-target potential as modified sgRNAs in the Hek_Cas9 cells via the oligo based insertion method described above. The off-target results were plotted in FIG. 4.

[0797] Table 26 shows the number of off-target integration sites detected in HekCas9 cells transfected with TTR sgRNAs along with a double stranded DNA oligo donor sequence.

TABLE 26
Number of off-target integration sites detected
for TTR sgRNAs via an insertion detection method

| GUIDE ID | # Sites |
|---|---|
| G000480 | 11 |
| G000481 | 3 |
| G000482 | 13 |
| G000483 | 5 |
| G000484 | 7 |
| G000485 | 22 |
| G000486 | 12 |
| G000487 | 14 |
| G000488 | 0 |
| G000489 | 19 |
| G000490 | 12 |
| G000491 | 28 |
| G000492 | 97 |
| G000493 | 7 |
| G000494 | 4 |
| G000495 | 13 |
| G000496 | 1 |
| G000497 | 26 |
| G000498 | 82 |
| G000499 | 4 |
| G000500 | 46 |
| G000501 | 4 |
| G000567 | 9 |
| G000568 | 937 |
| G000570 | 19 |
| G000571 | 16 |
| G000572 | 15 |

### Example 6. Targeted Sequencing for Validating Potential Off-Target Sites

[0798] The HEK293_Cas9 cells used in Example 5 for detecting potential off-targets constitutively overexpress Cas9, leading to a higher number of potential off-target “hits” as compared to a transient delivery paradigm in various cell types. Further, when delivering sgRNAs (as opposed to dgRNAs), the number of potential off-target hits may be further inflated as sgRNA molecules are more stable than dgRNAs (especially when chemically modified). Accordingly, potential off-target sites identified by an oligo insertion method as used in Example 5 may be validated using targeted sequencing of the identified potential off-target sites.

[0799] In one approach, primary hepatocytes are treated with LNPs comprising Cas9 mRNA and a sgRNA of interest (e.g., a sgRNA having potential off-target sites for evaluation). The primary hepatocytes are then lysed and primers flanking the potential off-target site(s) are used to generate an amplicon for NGS analysis. Identification of indels at a certain level may validate potential off-target site, whereas the lack of indels found at the potential off-target site may indicate a false positive in the HEK293_Cas9 cell assay.

### Example 7. Phenotypic Analysis

### Western Blot Analysis of Secreted TTR

[0800] The hepatocellular carcinoma cell line, HepG2, was transfected as described in Example 1 with select guides from Table 1 in triplicate. Two days post-transfection, one replicate was harvested for genomic DNA and analysis by NGS sequencing for editing efficiency. Five days post-transfection, media without serum was replaced on one replicate. After 4 hrs the media was harvested for analysis of secreted TTR by WB as previously described. The data for % edit for each guide and reduction of extracellular TTR is provided in FIG. 7.

### Western Blot Analysis of Intracellular TTR

[0801] The hepatocellular carcinoma cell line, HUH7, was transfected as described in Example 1 with crRNA comprising the guides from Table 1. The transfected pools of cells were retained in tissue culture and passaged for further analysis. At seven days post-transfection, cells were harvested and whole cell extracts (WCEs) were prepared and subjected to analysis by Western Blot as previously described.

[0802] WCEs were analyzed by Western Blot for reduction of TTR protein. Full length R protein has a predicted molecular weight of ˜16 kD. A band at this molecular weight was observed in the control lanes in the Western Blot.

[0803] Percent reduction of TTR protein was calculated using the Licor Odyssey Image Studio Ver 5.2 software. GAPDH was used as a loading control and probed simultaneously with TTR. A ratio was calculated for the densitometry values for GAPDH within each sample compared to the total region encompassing the TTR band. Percent reduction of TTR protein was determined after the ratios were normalized to control lanes. Results are shown in FIG. 8.

### Example 8. LNP Delivery to Humanized TTR Mice and Mice Having Wt (Murine) TTR

[0804] Mice humanized with respect to the TTR gene were dosed with LNP formulations 701-704 containing the guides indicated in Table 27 (5 mice per formulation). These humanized TTR mice were engineered such that a region of the endogenous murine TTR locus was deleted and replaced with an orthologous human TTR sequence so that the locus encodes a human TTR protein. For comparison, 6 mice with murine TTR were dosed with LNP700, containing a guide (G000282) targeting murine TTR. LNPs with Formulation Numbers 1-5 in Table 27 were prepared using the Nanoassemblr™ procedure as described above while LNPs with Formulation Numbers 6-16 were prepared using the cross-flow procedure described above but purified using PD-10 columns (GE Healthcare Life Sciences) and concentrated using Amicon centrifugal filter units (Millipore Sigma). As negative controls, mice of the corresponding genotype were dosed with vehicle alone (Tris-saline-sucrose buffer (TSS)). The background of the humanized TTR mice administered LNPs with Formulation Numbers 2-5 in Table 27 was 50% 12956/SvEvTac 50% C57BL/6NTac; the background of the humanized TTR mice administered LNPs having Formulation Numbers 6-16 in Table 25 as well as the mice with murine TTR (administered LNP700, Formulation Number 1) was 75% C57BL/6NTac 25% 12956/SvEvTac.

TABLE 27
LNP formulations for dosing humanized TTR mice.

| | | | | | Molar Ratios |
|---|---|---|---|---|---|
| | | | | | (Lipid A, |
| | | | RNA | | Cholesterol, |
| | | | concen- | | DSPC, and |
| Formulation | | | tration | N:P | PEG2k-DMG, |
| Number | LNP | Guide | (mg/ml) | Ratio | respectively) |
| 1 | LNP700 | G000282 | 0.53 | 4.5 | 45:44:9:2 |
| 2 | LNP701 | G000481 | 0.46 | 4.5 | 45:44:9:2 |
| 3 | LNP702 | G000489 | 0.61 | 4.5 | 45:44:9:2 |
| 4 | LNP703 | G000494 | 0.57 | 4.5 | 45:44:9:2 |
| 5 | LNP704 | G000499 | 0.59 | 4.5 | 45:44:9:2 |
| 6 | LNP1148 | G000481 | 0.73 | 4.5 | 45:44:9:2 |
| 7 | LNP1152 | G000499 | 0.45 | 6.0 | 50:38:9:3 |
| 8 | LNP1153 | G000482 | 0.53 | 6.0 | 50:38:9:3 |
| 9 | LNP1155 | G000571 | 0.70 | 6.0 | 50:38:9:3 |
| 10 | LNP1156 | G000572 | 0.58 | 6.0 | 50:38:9:3 |
| 11 | LNP1157 | G000480 | 0.84 | 6.0 | 50:38:9:3 |
| 12 | LNP1159 | G000488 | 0.79 | 6.0 | 50:38:9:3 |
| 13 | LNP1160 | G000493 | 0.71 | 6.0 | 50:38:9:3 |
| 14 | LNP1161 | G000500 | 0.66 | 6.0 | 50:38:9:3 |
| 15 | LNP1162 | G000567 | 0.69 | 6.0 | 50:38:9:3 |
| 16 | LNP1163 | G000570 | 0.66 | 6.0 | 50:38:9:3 |

[0805] LNPs having Formulation numbers 1-5 contained Cas9 mRNA of SEQ ID NO:2 and LNPs having Formulation Numbers 6-16 contained Cas9 mRNA of SEQ ID NO: 1, all in a 1:1 ratio by weight to the guide. The LNPs contained Lipid A, Cholesterol, DSPC, and PEG2k-DMG in the molar ratios recited in Table 27, respectively. Dosing with LNPs having Formulation Numbers 1-5 was at 2 mg/kg (total RNA content) and dosing with LNPs having Formulation Numbers 6-16 was at 1 mg/kg (total RNA content). Liver editing results were determined using primers designed to amplify the region of interest for NGS analysis. Liver editing results for Formulation Numbers 1-5 are shown in FIG. 9 and indicate editing of the human TTR sequence with each of the four guides tested at a level >35% editing (mean values) with G000494 and G000499 providing values near 60%. Liver editing results for formulation numbers 6-8, 10-13, and 15-16 are shown in FIG. 13 and Table 28, which show efficient editing of the human TTR sequence with each of the formulations tested. Greater than 38% editing was seen for all formulations, with several formulations providing editing values greater than 60%. Formulations 9 and 14 are not shown due to the design of the PCR amplicon and a resulting low number of sequencing reads.

[0806] The level of human TTR in serum was measured in the mice provided formulation numbers 6-8, 10-13, and 15-16. See FIG. 14B. FIG. 14A is a repeat of FIG. 13 provided for comparison purposes. Knockdown of serum human TTR was detected for each formulation tested, which correlated with the amount of editing detected in liver (See FIG. 14A vs 14B, Table 28).

TABLE 28

| GUIDE ID | % Editing | Serum TTR(% TSS) |
|---|---|---|
| TSS (vehicle) | 0.06 | 100 |
| G481 | 61.28 | 10.52 |
| G499 | 65.66 | 8.39 |
| G482 | 70.86 | 4.65 |
| G572 | 73.52 | 2.11 |
| G480 | 77.34 | 3.48 |
| G488 | 59.125 | 27.78 |
| G493 | 38.55 | 49.73 |
| G567 | 47.525 | 44.24 |
| G570 | 45.5 | 41.73 |
| G571 | 33.88 | 11.39 |
| G500 | 44.44 | 34.28 |

[0807] In another set of experiments, humanized TTR mice were dosed with LNP formulations across a range of doses with guides G000480, G000488, G000489 and G000502. The formulations contained Cas9 mRNA (SEQ ID NO: 1) in a 1:1 ratio by weight to the guide. The LNPs contained Lipid A, Cholesterol, DSPC, and PEG2k-DMG in a 50:38:9:3 molar ratio, respectively, and having a N:P ratio of 6. Dosing was at 1, 0.3, 0.1, or 0.03 mg/kg (n=5/group). The LNPs were prepared using the cross-flow procedure described above and purified and concentrated using PD-10 columns and Amicon centrifugal filter units, respectively. Liver editing results were determined using primers designed to amplify the region of interest for NGS analysis and serum human TTR levels were measured as described above. Results for liver editing are shown in FIG. 26A and serum human TTR levels in FIG. 26B-C. A dose response for both editing and serum TTR levels was evident.

[0808] In another set of experiments, humanized TTR mice were dosed with LNP formulations across a range of doses with guides G000481, G000482, G000486 and G000499. The formulations contained Cas9 mRNA (SEQ ID NO: 1) in a 1:1 ratio by weight to the guide. The LNPs contained Lipid A, Cholesterol, DSPC, and PEG2k-DMG in a 50:38:9:3 molar ratio, respectively, and had an N:P ratio of 6. Dosing was at 1, 0.3, or 0.1 mg/kg (n=5/group). The LNPs were prepared using the cross-flow procedure described above and purified and concentrated using PD-10 columns and Amicon centrifugal filter units, respectively. Liver editing results were determined using primers designed to amplify the region of interest for NGS analysis and serum human TTR levels were measured as described above. Results for liver editing are shown in FIG. 27A and serum human TTR levels in FIG. 27B-C. A dose response for both editing and serum TTR levels was evident.

[0809] In another set of experiments, humanized TTR mice were dosed with LNP formulations across a range of doses with guides G000480, G000481, G000486, G000499 and G000502. The formulations contained Cas9 mRNA (SEQ ID NO: 1) in a 1:2 ratio by weight to the guide. The LNPs contained Lipid A, Cholesterol, DSPC, and PEG2k-DMG in a 50:38:9:3 molar ratio, respectively, and had an N:P ratio of 6. Dosing was at 1, 0.3, or 0.1 mg/kg (n=5/group). The LNPs were prepared using the cross-flow procedure described above and purified and concentrated using PD-10 columns and Amicon centrifugal filter units, respectively. Liver editing results were determined using primers designed to amplify the region of interest for NGS analysis and serum human TTR levels were measured as described above. Results for liver editing are shown in FIG. 28A and serum human TTR levels in FIG. 28B-C. A dose response for both editing and serum TTR levels was evident.

[0810] In separate experiments using wild type CD-1 mice, an LNP formulation comprising guide G000502, which is cross homologous between mouse and cyno, was tested in a dose response study. The formulation contained Cas9 mRNA (SEQ ID NO: 1) in a 1:1 ratio by weight to the guide. The LNP contained Lipid A, Cholesterol, DSPC, and PEG2k-DMG in a 45:44:9:2 molar ratio, respectively, and having a N:P ratio of 6. Dosing was at 1, 0.3, 0.1, 0.03, or 0.01 mg/kg (n=5/group). Liver editing results were determined using primers designed to amplify the region of interest for NGS analysis. Results for liver editing are shown in FIG. 15A and serum mouse TTR levels in FIG. 15B. A dose response for both editing and serum TTR levels was evident.

### Example 9. LNP Delivery to Mice in Multiple Doses

[0811] Mice (females from Charles River Laboratory, aged approximately 6-7 weeks) were dosed with an LNP formulation LNP705, prepared using cross-flow and TFF procedures as described above containing G000282 (“G282”) and Cas9 mRNA (SEQ ID NO: 2) in a 1:1 ratio by weight and a total RNA concentration of 0.5 mg/ml. The LNP had an N:P ratio of 4.5 and contained Lipid A, Cholesterol, DSPC, and PEG2k-DMG in a 45:44:9:2 molar ratio, respectively. Groups were dosed either once weekly up to one, two, three, or four weeks (QW×1-4) or once monthly up to two or three months (QM×2-3). Dosages were 0.5 mg/kg or 1 mg/kg (total RNA content). Control groups received a single dose on day 1 of 0.5, 1, or 2 mg/kg. Each group contained 5 mice. Serum TTR was analyzed by ELISA and at necropsy the liver, spleen and muscle were each collected for NGS editing analysis. Groups are shown in Table 29. X=sacrifice and necropsy. MPK=mg/kg.

TABLE 29
Study Groups

| | | | Total | | | | | | | |
|---|---|---|---|---|---|---|---|---|---|---|
| | Duration/ | | Dose | Dose | Dose | Dose | Dose | NX | Dose | NX |
| | Dose | Dose | (MPK) | Day | Day | Day | Day | Day | Day | Day |
| Group | Regimen | (MPK) | Given | 1 | 8 | 15 | 22 | 28 | 43 | 49 |
| 1 | 4 Week | 0 (TSS | 0 | X | X | X | X | X | | |
| | Multi Dose/ | control) | | | | | | | | |
| | QWx4 | | | | | | | | | |
| 2 | 2 Month | 1 | 3 | X | | | X | | X | X |
| 3 | Multi Dose/ | 0.5 | 1.5 | X | | | X | | X | X |
| | QMx3 | | | | | | | | | |
| 4 | 1 Month | 1 | 2 | X | | | X | X | | |
| 5 | Multi Dose/ | 0.5 | 1 | X | | | X | X | | |
| | QMx2 | | | | | | | | | |
| 6 | 4 Week | 1 | 4 | X | X | X | X | X | | |
| 7 | Multi Dose/ | 0.5 | 2 | X | X | X | X | X | | |
| | QWx4 | | | | | | | | | |
| 8 | 3 Week | 1 | 3 | | X | X | X | X | | |
| 9 | Multi Dose/ | 0.5 | 1.5 | | X | X | X | X | | |
| | QWx3 | | | | | | | | | |
| 10 | 2 Week | 1 | 2 | | | X | X | X | | |
| 11 | Multi Dose/ | 0.5 | 1 | | | X | X | X | | |
| | QWx2 | | | | | | | | | |
| 12 | Single Dose/ | 1 | 1 | | | | X | X | | |
| 13 | QWx1 | 0.5 | 0.5 | | | | X | X | | |
| 14 | | 2 | 2 | | | | Day | Day | | |
| | | | | | | | 26 | 32 | | |

[0812] Table 30 and FIGS. 10A-11B show serum TTR level results (% KD=% knockdown). Table 30 and FIGS. 12A-C show liver editing results.

TABLE 30
Serum TTR Results.

| Time | | Serum TTR | Serum TTR |
|---|---|---|---|
| Regimen | Dose | (μg/mL) | (% KD) |
| QWx4 | TSS | 1190.7 | — |
| QMx3 | 0.5 | 245.01 | 79.42 |
| QMx2 | 0.5 | 776.73 | 34.77 |
| QWx4 | 0.5 | 347.43 | 70.82 |
| QWx3 | 0.5 | 405.70 | 65.93 |
| QWx2 | 0.5 | 432.25 | 63.70 |
| QWx1 | 0.5 | 804.06 | 32.47 |
| QMx3 | 1 | 91.95 | 92.28 |
| QMx2 | 1 | 176.81 | 85.15 |
| QWx4 | 1 | 119.52 | 89.96 |
| QWx3 | 1 | 167.15 | 85.96 |
| QWx2 | 1 | 130.98 | 89.00 |
| QWx1 | 1 | 573.02 | 51.88 |
| QWx1 | 2 | 219.07 | 81.60 |

TABLE 31
Liver Editing Results.

| Time | | Liver Editing |
|---|---|---|
| Regimen | Dose | (%) |
| QWx4 | TSS | 0.38 |
| QMx3 | 0.5 | 48.18 |
| QMx2 | 0.5 | 36.66 |
| QWx4 | 0.5 | 56.03 |
| QWx3 | 0.5 | 51.35 |
| QWx2 | 0.5 | 34.77 |
| QWx1 | 0.5 | 24.16 |
| QMx3 | 1 | 63.40 |
| QMx2 | 1 | 57.37 |
| QWx4 | 1 | 62.89 |
| QWx3 | 1 | 59.22 |
| QWx2 | 1 | 60.12 |
| QWx1 | 1 | 35.16 |
| QWx1 | 2 | 60.57 |

[0813] The results show that it is possible to build up a cumulative dose and effect with multiple administrations over time, including at weekly or monthly intervals, to achieve increasing editing levels and % KD of TTR.

### Example 10. RNA Cargo: Varying mRNA and gRNA Ratios

[0814] This study evaluated in vivo efficacy in mice of different ratios of gRNA to mRNA. CleanCap™ capped Cas9 mRNAs with the ORF of SEQ ID NO: 4, HSD 5′ UTR, human albumin 3′ UTR, a Kozak sequence, and a poly-A tail were made by IVT synthesis as indicated in Example 1 with N1-methylpseudouridine triphosphate in place of uridine triphosphate.

[0815] LNP formulations prepared from the mRNA described and G282 (SEQ ID NO: 124) as described in Example 1 with Lipid A, cholesterol, DSPC, and PEG2k-DMG in a 50:38:9:3 molar ratio and with an N:P ratio of 6. The gRNA:Cas9 mRNA weight ratios of the formulations were as shown in FIGS. 19A and 19B.

[0816] For in vivo characterization, the LNPs were administered to mice at 0.1 mg total RNA (mg guide RNA+mg mRNA) per kg (n=5 per group). At 7-9 days post-dose, animals were sacrificed, blood and the liver were collected, and serum TTR and liver editing were measured as described in Example 1. Serum TTR and liver editing results are shown in FIGS. 19A and 19B. Negative control mice were dosed with TSS vehicle.

[0817] In addition, the above LNPs were administered to mice at a constant mRNA dose of 0.05 mg mRNA per kg (n=5 per group), while varying the gRNA dose from 0.06 mg per kg to 0.4 mg per kg. At 7-9 days post-dose, animals were sacrificed, blood and the liver were collected, and serum TTR and liver editing were measured. Serum TTR and liver editing results are shown in FIG. 19C and FIG. 19D. Negative control mice were dosed with TSS vehicle.

### Example 11. Off-Target Analysis of TTR sgRNAs in Primary Human Hepatocytes

[0818] Off-target analysis of sgRNAs targeting TTR was performed in primary human hepatocytes (PHH) as described in Example 5, with the following modifications. PHH were plated at a density of 33,000 cells per well on collagen-coated 96-well plates as described in Example 1. Twenty-four hours post plating, cells were washed with media and transfected using Lipofectamine RNAiMAX (ThermoFisher, Cat. 13778150) as described in Example 1. Cells were transfected with a lipoplex containing 100 ng Cas9 mRNA, immediately followed by the addition of another lipoplex containing 25 nM of the sgRNA and 12.5 nM of the donor oligo (0.3 μL/well). Cells were lysed 48 hours post-transfection and gDNA was extracted and analyzed as further described in Example 5. The data is graphically represented in FIG. 20.

[0819] Table 32 shows the number of off-target integration sites detected in PHH, and compares to the number of sites that were detected in the HekCas9 cells used in Example 5. Fewer sites were detected in PHH for every guide tested as compared to the HekCas9 cell line, with no unique sites detected in PHH alone.

TABLE 32
Number of off-target integration sites detected for
TTR sgRNAs in PHH via an oligo insertion based assay

| | | # Sites in HekCas9 cells |
|---|---|---|
| GUIDE ID | # Sites in PHH | (Example 5) |
| G000480 | 2 | 11 |
| G000481 | 0 | 3 |
| G000482 | 2 | 13 |
| G000483 | 0 | 5 |
| G000484 | 0 | 7 |
| G000485 | 3 | 22 |
| G000486 | 0 | 12 |
| G000487 | 0 | 14 |
| G000488 | 0 | 0 |
| G000489 | 2 | 19 |
| G000490 | 0 | 12 |
| G000491 | 7 | 28 |
| G000492 | 5 | 97 |
| G000493 | 1 | 7 |
| G000494 | 0 | 4 |
| G000495 | 1 | 13 |
| G000496 | 0 | 1 |
| G000497 | 3 | 26 |
| G000498 | 19 | 82 |
| G000499 | 1 | 4 |
| G000500 | 12 | 46 |
| G000501 | 0 | 4 |
| G000567 | 0 | 9 |
| G000568 | 11 | 936 |
| G000570 | 1 | 19 |
| G000571 | 1 | 16 |
| G000572 | 2 | 15 |

[0820] Following the identification of potential off-target sites in PHH via the oligo insertion assay, certain potential sites were further evaluated by targeted amplicon sequencing, e.g., as described in Example 6. In addition to the potential off-target sites identified by the oligo insertion strategy, additional potential off-target sites identified by in silico prediction were included in the analysis.

[0821] To this end, PHH were treated with LNPs comprising 100 ng of Cas9 mRNA (SEQ ID NO:1) and the gRNA of interest at 14.68 nM (in a 1:1 ratio by weight), as described in Example 4. The LNPs were prepared using the cross-flow procedure described above and purified and concentrated using PD-10 columns and Amicon centrifugal filter units, respectively. The LNPs were formulated with an N:P ratio of 6.0 and contained Lipid A, Cholesterol, DSPC, and PEG2k-DMG in a 50:38:9:2 molar ratio, respectively. Following LNP treatment, isolated genomic DNA was analyzed by NGS (e.g., as described in Examples 1 and 6) to determine whether indels could be detected at the potential off-target site, which would be indicative of a Cas9-mediated cleavage event. Tables 33 and 34 show the potential off-target sites that were evaluated for the gRNAs G000480 and G000486, respectively.

[0822] As shown in FIGS. 21A-B and 22A-B and Table 35 below, indels were detected at low levels for only two of the potential off-target sites identified by the oligo insertion assay for G000480, and only one for G000486. No indels were detected at any of the in silico predicted sites for either guide. Further, indels were only detected at these sites using a near-saturating dose of LNP, as the indel rates observed at the on-target sites for G000480 and G000486 were ˜97% and ˜91%, respectively (See Table 35). The genomic coordinates of these sites are also reported in Tables 33 and 34, and each correspond to sequences that do not code for any protein.

[0823] A dose response assay was then performed in order to determine the highest dose of LNP in which no off-targets were detected. PHH were treated with LNPs comprising either G000480 or G000486 as described in Example 4. The doses ranged across 11 points with respect to gRNA concentration (0.001 nM, 0.002 nM, 0.007 nM, 0.02 nM, 0.06 nM, 0.19 nM, 0.57 nM, 1.72 nM, 5.17 nM, 15.51 nM, and 46.55 nM). As represented by the dashed vertical line in FIGS. 21A-B and 22A-B, the highest concentrations (with respect to the concentration of gRNA) at which the potential off-target sites were no longer detected for G000480 and G000486 were 0.57 nM and 15.51 nM, respectively, which resulted in on-target indel rates of 84.60% and 89.50%, respectively.

TABLE 33
Identified potential off target sites via insertion detection and in silico
prediction for G000480 evaluated via targeted amplicon sequencing

| | Off-target | | Chromosomal Coordinates | |
|---|---|---|---|---|
| GUIDE ID | (OT) Site ID | Assay Used | (hg38) | Strand |
| G000480 | INS-OT.1 | Insertion Detection | chr7: 94767406-94767426 | + |
| G000480 | INS-OT.2 | Insertion Detection | chr2: 192658562-192658582 | + |
| G000480 | INS-OT.3 | Insertion Detection | chr7: 4834390-4834410 | + |
| G000480 | INS-OT.4 | Insertion Detection | chr20: 9216118-9216138 | − |
| G000480 | INS-OT.5 | Insertion Detection | chr10: 12547071-12547091 | + |
| G000480 | INS-OT.6 | Insertion Detection | chr6: 168377978-168377998 | − |
| G000480 | INS-OT.7 | Insertion Detection | chr12: 114144669-114144689 | − |
| G000480 | INS-OT.8 | Insertion Detection | chr10: 7376755-7376775 | + |
| G000480 | INS-OT.9 | Insertion Detection | chr2: 52950299-52950319 | + |
| G000480 | INS-OT.10 | Insertion Detection | chr8: 56579165-56579185 | − |
| G000480 | INS-OT.11 | Insertion Detection | chr1: 189992255-189992275 | + |
| G000480 | PRED-OT.1 | in silico prediction | chr10: 12547071-12547091 | + |
| G000480 | PRE-DOT.2 | in silico prediction | chrX: 119702782-119702802 | + |
| G000480 | PRED-OT.3 | in silico prediction | chr1: 116544586-116544606 | + |
| G000480 | PRED-OT.4 | in silico prediction | chr6: 88282884-88282904 | + |
| G000480 | PRED-OT.6 | in silico prediction | chr5: 121891868-121891888 | + |
| G000480 | PRED-OT.7 | in silico prediction | chr3: 52544945-52544965 | + |
| G000480 | PRED-OT.8 | in silico prediction | chr15: 36949639-36949659 | + |
| G000480 | PRED-OT.9 | in silico prediction | chr5: 33866486-33866506 | + |
| G000480 | PRED-OT.10 | in silico prediction | chr5: 159755754-159755774 | + |
| G000480 | PRED-OT.11 | in silico prediction | chr5: 31349859-31349879 | + |
| G000480 | PRED-OT.12 | in silico prediction | chr11: 79485652-79485672 | + |
| G000480 | PRED-OT.13 | in silico prediction | chr15: 29448864-29448884 | + |
| G000480 | PRED-OT.14 | in silico prediction | chr5: 171153565-171153585 | + |
| G000480 | PRED-OT.15 | in silico prediction | chr9: 84855273-84855293 | + |
| G000480 | PRED-OT.16 | in silico prediction | chr6: 159953060-159953080 | + |
| G000480 | PRED-OT.17 | in silico prediction | chr16: 51849024-51849044 | + |
| G000480 | PRED-OT.18 | in silico prediction | chr3: 24108809-24108829 | + |
| G000480 | PRED-OT.19 | in silico prediction | chr18: 41118310-41118330 | + |
| G000480 | PRED-OT.20 | in silico prediction | chr10: 108975241-108975261 | + |
| G000480 | PREDO-T.21 | in silico prediction | chr1: 44683633-44683653 | + |
| G000480 | PRED-OT.22 | in silico prediction | chr2: 196214849-196214869 | + |
| G000480 | PRED-OT.23 | in silico prediction | chr9: 117353544-117353564 | + |
| G000480 | PRED-OT.24 | in silico prediction | chr1: 55583322-55583342 | + |
| G000480 | PRED-OT.25 | in silico prediction | chr12: 28246827-28246847 | + |
| G000480 | PRED-OT.26 | in silico prediction | chr4: 54545361-54545381 | + |
| G000480 | PRED-OT.27 | in silico prediction | chr13: 22364836-22364856 | + |
| G000480 | PRED-OT.28 | in silico prediction | chr13: 80816049-80816069 | + |
| G000480 | PRED-OT.29 | in silico prediction | chr7: 39078622-39078642 | + |
| G000480 | PRED-OT.30 | in silico prediction | chr2: 59944386-59944406 | + |

[0824] “INS-OT.N” refers to an off-target site ID detected by oligo insertion, where N is an integer specified above; “PRED-OT.N refers to an off-target site ID predicted via in silico methods, where N is an integer specified above.

TABLE 34
Identified potential off target sites via insertion detection and in silico
prediction for G000486 evaluated via targeted amplicon sequencing

| | Off-target | | Chromosomal Coordinates | |
|---|---|---|---|---|
| GUIDE ID | (OT) Site ID | Assay Used | (hg38) | Strand |
| G000486 | INS-OT.1 | Insertion Detection | chr14: 77332157-77332177 | + |
| G000486 | INS-OT.2 | Insertion Detection | chr14: 54672059-54672079 | − |
| G000486 | INS-OT.3 | Insertion Detection | chr4: 108513169-108513189 | − |
| G000486 | INS-OT.4 | Insertion Detection | chr5: 91397023-91397043 | − |
| G000486 | INS-OT.5 | Insertion Detection | chr9: 116626135-116626155 | − |
| G000486 | INS-OT.6 | Insertion Detection | chr6: 73201226-73201246 | + |
| G000486 | INS-OT.7 | Insertion Detection | chr16: 89368352-89368372 | − |
| G000486 | INS-OT.8 | Insertion Detection | chr7: 56308371-56308391 | − |
| G000486 | INS-OT.9 | Insertion Detection | chr21: 43605667-43605687 | + |
| G000486 | INS-OT.10 | Insertion Detection | chr5: 26758030-26758050 | + |
| G000486 | INS-OT.11 | Insertion Detection | chr17: 30656428-30656448 | + |
| G000486 | INS-OT.12 | Insertion Detection | chr8: 130486452-A130486472 | + |
| G000486 | PRED-OT.1 | in silico prediction | chr11: 44707064-44707084 | + |
| G000486 | PRED-OT.2 | in silico prediction | chr5: 50775396-50775416 | + |
| G000486 | PRED-OT.3 | in silico prediction | chr4: 141623949-141623969 | + |
| G000486 | PRED-OT.4 | in silico prediction | chr1: 223481186-223481206 | + |
| G000486 | PRED-OT.5 | in silico prediction | chr6: 39951487-39951507 | + |
| G000486 | PRED-OT.6 | in silico prediction | chrY: 5456047-5456067 | + |
| G000486 | PRED-OT.8 | in silico prediction | chr6: 129868719-129868739 | + |
| G000486 | PRED-OT.9 | in silico prediction | chrX: 80450312-80450332 | + |
| G000486 | PRED-OT.10 | in silico prediction | chr7: 27256771-27256791 | + |
| G000486 | PRED-OT.11 | in silico prediction | chr3: 181416528-181416548 | + |
| G000486 | PRED-OT12 | in silico prediction | chr7: 146425020-146425040 | + |
| G000486 | PRED-OT.13 | in silico prediction | chr3: 16980977-16980997 | + |
| G000486 | PRED-OT.14 | in silico prediction | chr7: 118161002-118161022 | + |
| G000486 | PRED-OT.15 | in silico prediction | chr6: 102220539-102220559 | + |
| G000486 | PRED-OT.16 | in silico prediction | chr12: 127278991-127279011 | + |
| G000486 | PRED-OT.17 | in silico prediction | chr2: 67686631-67686651 | + |
| G000486 | PRED-OT.18 | in silico prediction | chr1: 114467665-114467685 | + |
| G000486 | PRED-OT.19 | in silico prediction | chr3: 194514436-194514456 | + |
| G000486 | PRED-OT.20 | in silico prediction | chr14: 31767581-31767601 | + |
| G000486 | PRED-OT.21 | in silico prediction | chr16: 28706209-28706229 | + |
| G000486 | PRED-OT.22 | in silico prediction | chr8: 110526279-110526299 | + |
| G000486 | PRED-OT.23 | in silico prediction | chr19: 2899814-2899834 | + |
| G000486 | PRED-OT.25 | in silico prediction | chr3: 130760261-A130760281 | + |
| G000486 | PRED-OT.26 | in silico prediction | chr11: 2506046-2506066 | + |
| G000486 | PRED-OT.27 | in silico prediction | chr2: 153918318-153918338 | + |
| G000486 | PRED-OT.28 | in silico prediction | chr14: 40590226-40590246 | + |
| G000486 | PRED-OT.29 | in silico prediction | chr18: 806650-806670 | + |
| G000486 | PRED-OT.30 | in silico prediction | chr2: 117707480-117707500 | + |

[0825] “INS-OT.N” refers to an off-target site ID detected by oligo insertion, where N is an integer specified above; “PRED-OT.N” refers to an off-target site ID predicted via in silico methods, where N is an integer specified.

TABLE 35
Detected Off Target sites in PHH treated with
LNP containing 100 ng mRNA and 31.03 nM gRNA

| | | | Indel Frequency | |
|---|---|---|---|---|
| | Off-target | | (using LNP with | Indel |
| | (OT) Site | Site | 100 ng Cas9 mRNA | Frequency |
| GUIDE ID | ID | Type | and 14.68 nM gRNA) | std. dev. |
| G000480 | n/a | On-Target | 97.33% | 1.10% |
| G000480 | INS-OT.2 | Off-Target | 1.43% | 0.40% |
| G000480 | INS-OT.4 | Off-Target | 0.97% | 0.25% |
| G000486 | n/a | On-Target | 91.33% | 1.97% |
| G000486 | INS-OT.4 | Off-Target | 0.47% | 0.06% |

### Example 12. LNP Delivery to Humanized Mouse Model of ATTR

[0826] A well-established humanized transgenic mouse model of hereditary ATTR amyloidosis that expresses the V30M pathogenic mutant form of human TTR protein was used in this Example. This mouse model recapitulates the TTR deposition phenotype in tissues observed in ATTR patients, including within the peripheral nervous system and gastrointestinal (GI) tract (See Santos et al., Neurobiol Aging. 2010 February; 31(2):280-9).

[0827] Mice (aged approximately 4-5 months) were dosed with LNP formulations prepared using the cross-flow and TFF procedures as described in Example 1. The LNPs were formulated with an N:P ratio of 6.0 and contained Lipid A, Cholesterol, DSPC, and PEG2k-DMG in a 50:38:9:2 molar ratio, respectively. The LNPs contained Cas9 mRNA (SEQ ID NO: 1) and either G000481 (“G481”) or a non-targeting control guide G000395 (“G395”; SEQ ID NO: 273), in a 1:1 ratio of gRNA:mRNA by weight.

[0828] Mice were injected via the lateral tail vein as described in Example 1 with a single 1 mg/kg (of total RNA content) dose of LNP with an n=10/group. At 8 weeks post treatment, the mice were euthanized for sample collection. Human TTR protein levels were measured in serum and cerebrospinal fluid (CSF) by ELISA as previously described by Butler et al., Amyloid. 2016 June; 23(2):109-18. Liver tissue was assayed for editing levels as described in Example 1. Other tissues (stomach, colon, sciatic nerve, dorsal root ganglion (DRG)) were collected and processed for semi-quantitative immunohistochemistry as previously described by Gonçalves et al., Amyloid. 2014 September; 21(3): 175-184. Statistical analysis for the immunohistochemistry data was performed using Mann Whitney test with a p-value<0.0001.

[0829] As shown in FIG. 23A-B, robust editing (49.4%) of TTR was observed in livers of the humanized mice following the single dose of LNP comprising G481, with no editing detected in the control group. Analysis of the editing events demonstrated that 96.8% of the events were insertions, with the remainder deletions.

[0830] As shown in FIG. 24A-B, TTR protein levels were decreased in plasma but not in CSF from the treated mice, with greater than 99% knockdown of TTR plasma levels observed (p<0.001).

[0831] The near complete knockdown of TTR observed in the plasma of treated animals correlated with the clearance of TTR protein amyloid deposition in the assayed tissues. As shown in FIG. 25, control mice exhibited amyloid staining in tissues which resembles the pathophysiology observed in human subjects with ATTR. Decreasing circulating TTR by editing the HuTTR V30M locus resulted in a dramatic decrease of amyloid deposition in tissues. Approximately 85% or better reduction in TTR staining was observed across the treated tissues 8 weeks post-treatment (FIG. 25).

### Example 13. TTR mRNA Knockdown in Primary Human Hepatocytes (PHH)

[0832] In one experiment, PHH were cultured and treated with LNPs comprising Cas9 mRNA (SEQ ID NO:1) and a gRNA of interest (See FIG. 29, Table 36), as described in Example 4. The LNPs were prepared using the cross-flow procedure described above and purified and concentrated using PD-10 columns and Amicon centrifugal filter units, respectively. The LNPs were formulated with an N:P ratio of 6.0 and contained Lipid A, Cholesterol, DSPC, and PEG2k-DMG in a 50:38:9:2 molar ratio, respectively. The LNPs comprised a gRNA:mRNA ratio of 1:2, and the cells were treated at a dose of 300 ng (with respect to the amount of mRNA cargo delivered).

[0833] Ninety-six (96) hours following LNP treatment (with biological triplicates for each condition), mRNA was purified from PHH cells using the Dynabeads mRNA DIRECT Kit (ThermoFisher Scientific) according to the manufacturer's protocol. Reverse Transcription (RT) was performed with Maxima reverse transcriptase (ThermoFisher Scientific) and a poly-dT primer. The resulting cDNA was purified with Ampure XP Beads (Agencourt). For Quantitative PCR, 2% of the purified cDNA was amplified with Taqman Fast Advanced Mastermix and 3 Taqman probe sets, TTR (Assay ID: Hs00174914_m1), GAPDH (Assay ID: Hs02786624_g1), and PPIB (Assay ID: Hs00168719_m1). The assays were run on the QuantStudio 7 Flex Real Time PCR System according to the manufacturer's instructions (Life Technologies). Relative expression of TTR mRNA was calculated by normalizing to the endogenous controls (GAPDH and PPIB) individually, and then averaged.

[0834] As shown in FIG. 29 and reproduced numerically in Table 36 below, each of the LNP formulations tested resulted in knockdown of TTR mRNA, as compared to the negative (untreated) control. The groups in FIG. 29 and Table 36 are identified by the gRNA ID used in each LNP preparation. Relative expression of TTR mRNA is plotted in FIG. 29, whereas the percent knockdown of TTR mRNA is provided in Table 36.

TABLE 36

| GUIDE ID | Avg % Knockdown | Std Dev |
|---|---|---|
| G000480 | 95.19 | 1.68 |
| G000481 | 91.39 | 2.39 |
| G000482 | 82.31 | 4.51 |
| G000483 | 68.78 | 13.45 |
| G000484 | 75.22 | 9.05 |
| G000488 | 92.77 | 3.76 |
| G000489 | 91.85 | 2.77 |
| G000490 | 78.34 | 5.76 |
| G000493 | 87.53 | 4.54 |
| G000494 | 91.15 | 3.63 |
| G000499 | 91.38 | 1.71 |
| G000500 | 92.90 | 3.15 |
| G000567 | 90.89 | 5.39 |
| G000568 | 53.44 | 20.20 |
| G000570 | 93.38 | 2.66 |
| G000571 | 96.17 | 2.07 |
| G000572 | 55.92 | 24.53 |

[0835] In a separate experiment, TTR mRNA knockdown was evaluated following treatment with LNPs comprising G000480, G000486, and G000502. The LNPs were formulated and PHH were cultured and treated with the LNPs, each as described in the experiment above in this Example with the exception that the cells were treated at a dose of 100 ng (with respect to the amount of mRNA cargo delivered).

[0836] Ninety-six (96) hours following LNP treatment (single treatment for each condition), mRNA was purified from PHH cells using the Dynabeads mRNA DIRECT Kit (ThermoFisher Scientific) according to the manufacturer's protocol. Reverse Transcription (RT) was performed with the High Capacity cDNA Reverse Transcription Kit (ThermoFisher Scientific) according to the manufacturer's instructions. For Quantitative PCR, 2% of the cDNA was amplified with Taqman Fast Advanced Mastermix and 3 Taqman probe sets, TTR (Assay ID: Hs00174914_m1), GAPDH (Assay ID: Hs02786624_g1), and PPIB (Assay ID: Hs00168719_m1). The assays were run on the QuantStudio 7 Flex Real Time PCR System according to the manufacturer's instructions (Life Technologies). Relative expression of TTR mRNA was calculated by normalizing to the endogenous controls (GAPDH and PPIB) individually, and then averaged.

[0837] As shown in FIG. 30 and reproduced numerically in Table 37 below, each of the LNP formulations tested resulted in knockdown of TTR mRNA, as compared to the negative (untreated) control. The groups in FIG. 30 and Table 37 are identified by the gRNA ID used in each LNP preparation. Relative expression of TTR mRNA is plotted in FIG. 30, whereas the percent knockdown of TTR mRNA is provided in Table 37.

TABLE 37

| GUIDE ID | Avg % Knockdown | Std Dev |
|---|---|---|
| G000480 | 95.61 | 0.92 |
| G000486 | 97.36 | 0.63 |
| G000502 | 90.94 | 2.63 |

### Example 14. Corticosteroid Pre-Treatment and LNP Delivery to Non-Human Primates

[0838] Male cynomologus monkeys in cohorts of n=3 were treated with dexamethasone and varying doses of LNP to provide 1 mg/kg, 3 mg/kg, or 6 mg/kg (RNA) per NHP. Each formulation contained Cas9 mRNA000042 (SEQ ID No. 377) and guide RNA (gRNA) G000502 (SEQ ID No. 114) in a gRNA:mRNA ratio of 1:2 by weight. Except for animals treated with vehicle control, all animals received dexamethasone (Dex) pre-treatment at 2 mg/kg by IV bolus injection 1-2 hours prior to LNP administration. Doses of LNP (in mg/kg, total RNA content), were administered by 30 minute IV infusion.

[0839] At day 15 post-dose, liver specimens were collected through single ultrasound-guided percutaneous biopsy targeting the right lobe/side of the liver, using a 16-gauge SuperCore biopsy needle. A minimum of 1.5 cm³ of total liver biopsy were collected per animal. Each biopsy specimen was flash frozen in liquid nitrogen and stored at −86 to −60° C. Editing analysis of the liver specimens was performed through NGS sequencing as previously described. Results for the liver editing demonstrated up to about 70% editing with all doses well tolerated. Corticosteroid pre-treatment with the described LNP treatment was well tolerated.

[0840] Materials and Methods for Example 14. mRNA was synthesized by in vitro transcription (IVT) using a linearized plasmid DNA template and T7 RNA polymerase. Transcription was generally performed from constructs comprising a T7 Promoter (SEQ ID NO: 231), a transcript sequence disclosed herein such as SEQ ID NO: 377 (which encodes the RNA ORF of SEQ ID NO: 311), and a poly-A tail (SEQ ID NO: 263) encoded in the plasmid.

[0841] For all methods, the transcript concentration was determined by measuring the light absorbance at 260 nm (Nanodrop), and the transcript was analyzed by capillary electrophoresis by Bioanalyzer (Agilent).

[0842] LNP Formulation

[0843] The lipid components were dissolved in 100% ethanol with the lipid component molar ratios described below. The chemically modified sgRNA and Cas9 mRNA were combined and dissolved in 25 mM citrate, 100 mM NaCl, pH 5.0, resulting in a concentration of total RNA cargo of approximately 1.5 mg/mL. The LNPs were formulated with an N/P ratio of about 6, with the ratio of chemically modified sgRNA:Cas9 mRNA at a 1:2 w/w ratio as described below. LNPs were formulated with 50% Lipid A, 9% DSPC, 38% cholesterol, and 3% PEG2k-DMG, and LNPs were formed by cross-flow technique as described in Example 1. During mixing, a 2:1 ratio of aqueous to organic solvent was maintained using differential flow rates. Diluted LNPs were concentrated using tangential flow filtration and then buffer exchanged by diafiltration prior to filtering and storage.

Cas9 mRNA and gRNA Cargos

[0844] Capped and polyadenylated Cas9 mRNA was generated by in vitro transcription using a linearized plasmid DNA template and T7 RNA polymerase using the method described in Example 1.

### Genomic DNA Isolation

[0845] Genomic DNA was extracted from liver samples using 50 μL/well BuccalAmp DNA Extraction solution (Epicentre, Cat. QE09050) according to manufacturer's protocol. All DNA samples were subjected to PCR and subsequent NGS analysis, as described herein.

### NGS Sequencing

[0846] In brief, to quantitatively determine the efficiency of editing at the target location in the genome, genomic DNA was isolated and deep sequencing was utilized to identify the presence of insertions and deletions introduced by gene editing.

[0847] PCR primers were designed around the target site (e.g., TTR), and the genomic area of interest was amplified. Primer sequences are provided below. Additional PCR was performed according to the manufacturer's protocols (Illumina) to add the necessary chemistry for sequencing. The amplicons were sequenced on an Illumina MiSeq instrument. The reads were aligned to a cyno reference genome (e.g., macFas5) after eliminating those having low quality scores. The resulting files containing the reads were mapped to the reference genome (BAM files), where reads that overlapped the target region of interest were selected and the number of wild type reads versus the number of reads which contain an insertion, substitution, or deletion was calculated.

[0848] The editing percentage (e.g., the “editing efficiency” or “percent editing”) is defined as the total number of sequence reads with insertions or deletions over the total number of sequence reads, including wild type.

### Example 15: Multiple Dose LNP Study Administered Via 30 Minute and 2 Hour IV Infusion in Cynomolgus Monkeys

[0849] Male cynomolgus monkeys in cohorts of n=3 were administered dexamethasone (Dex) via IV bolus injection at 2 mg/kg a minimum of 1 hour prior to LNP or vehicle control administration. Each cohort received varying doses of LNP to provide 3 mg/kg, or 6 mg/kg (RNA) per NHP. Dosing groups are shown in Table 38. Two cohorts received an LNP dose of 3 mg/kg in order to compare infusion time. Formulations contained Cas9 mRNA and guide RNA were prepared as described below and in Example 14. The LNP formulations were prepared as described below and in Example 14. The cohorts receiving an LNP dose of 3 mg/kg (total RNA content), were administered by 30-minute or 120-minute IV infusion. All other cohorts with various doses of LNP (in mg/kg, total RNA content), were administered by 120-minute IV infusion.

TABLE 38
Infusion Study Dosing Groups

| | | Dose | | |
|---|---|---|---|---|
| Group | | Level | Infusion | |
| Number | Test Material | (mg/kg) | Time (min) | # of Animals |
| 1 | TSS Control | 0 | 120 | 3 |
| 2 | LNP | 3.0 | 120 | 3 |
| 3 | LNP | 3.0 | 30 | 3 |
| 4 | LNP | 6.0 | 120 | 3 |

TABLE 39
% Editing and Serum TTR

| | | |
|---|---|---|
| Group | | |
| Number | Liver Editing (%) | TTR % Reduction |

| | | | | |
|---|---|---|---|---|
| 1 | 0.0 | (0.0, 0.0, 0.0) | −28 | (−34, −23, −27) |
| 2 | 63.3 | (50.8, 69.0, 69.9) | 85 | (66, 95, 94) |
| 3 | 63.3 | (65.0, 66.0, 58.8) | 88 | (90, 89, 86) |
| 4 | 74.5 | (75.3, 74.6, 73.6) | 96 | (97, 96, 95) |

[0850] At day 29 post-dose, liver specimens were collected through single ultrasound-guided percutaneous biopsy targeting the right lobe/side of the liver, using a 16-gauge SuperCore biopsy needle under an intramuscular injection of ketamine/xylazine. A sample between 1.0 cm³ and 1.5 cm³ of total liver biopsy were collected per animal. Each biopsy specimen was flash frozen in liquid nitrogen and stored at −80° C. Editing analysis of the liver specimens was performed through NGS sequencing as previously described and is shown in FIG. 31B. Results for the liver editing demonstrated up to about 70% editing. Serum TTR levels are depicted in FIG. 31A. Corticosteroid pre-treatment with the described LNP treatment was well tolerated.

TABLE 40
Alanine Transaminase (ALT) Levels

| | Pre- Bleed | | 6 Hour | | 24 Hour | | 48 Hour | | Day 7 | | Day 29 | |
|---|---|---|---|---|---|---|---|---|---|---|---|---|
| Group | Avg | SD | Avg | SD | Avg | SD | Avg | SD | Avg | SD | Avg | SD |
| Group 1: TSS | 49.0 | 11.1 | 173.6 | 30.2 | 175.3 | 29.1 | 155.6 | 21.7 | 76.0 | 4.5 | 49.0 | 8.8 |
| Group 2: 3 mpk, | 40.3 | 9.0 | 77.6 | 18.4 | 74.0 | 19.3 | 56.0 | 16.3 | 44.0 | 7.5 | 37.3 | 7.0 |
| 2 hr infusion | | | | | | | | | | | | |
| Group 3: 3 mpk, | 50.3 | 7.5 | 149.0 | 130.0 | 285.3 | 352.2 | 236.3 | 294.1 | 88.3 | 88.1 | 35.6 | 6.3 |
| 30 min infusion | | | | | | | | | | | | |
| Group 4: 6 mpk, | 30.6 | 12.5 | 108.3 | 48.4 | 162.0 | 87.1 | 209.0 | 174.6 | 65.0 | 32.0 | 27.0 | 7.5 |
| 2 hr infusion | | | | | | | | | | | | |

[0851] Samples were analyzed for percent editing data, serum TTR data, and alanine transaminase (ALT) levels as shown in Table 39 and FIGS. 31A-B, and Table 40 and FIG. 31C, respectively. Results for the liver editing and serum TTR data demonstrate that there is no significant difference in potency between the 3 mg/kg dose with a 30 minute infusion time and a 3 mg/kg dose with a 120 minute infusion time. The greater than 30′ infusion time administrations, however, demonstrate lower levels of ALT, a liver injury biomarker. ALT levels were observed to be higher in the 3 mg/kg dose with a 30 minute infusion time which indicated potential liver stress.

[0852] Materials and Methods for Example 4. mRNA was synthesized by in vitro transcription (IVT) using a linearized plasmid DNA template and T7 RNA polymerase. Transcription was generally performed from constructs comprising a T7 Promoter (SEQ ID NO: 231), a transcript sequence disclosed herein such as SEQ ID NO: 377 (which encodes the RNA ORF of SEQ ID NO: 311), and a poly-A tail (SEQ ID NO: 263) encoded in the plasmid.

[0853] For all methods, the transcript concentration was determined by measuring the light absorbance at 260 nm (Nanodrop), and the transcript was analyzed by capillary electrophoresis by Bioanalyzer (Agilent).

[0854] LNP Formulation

[0855] The lipid components were dissolved in 100% ethanol with the lipid component molar ratios described below. The chemically modified sgRNA and Cas9 mRNA were combined and dissolved in 25 mM citrate, 100 mM NaCl, pH 5.0, resulting in a concentration of total RNA cargo of approximately 1.5 mg/mL. The LNPs were formulated with an N/P ratio of about 6, with the ratio of chemically modified sgRNA:Cas9 mRNA at a 1:2 w/w ratio as described below. LNPs were formulated with 50% Lipid A, 9% DSPC, 38% cholesterol, and 3% PEG2k-DMG, and LNPs were formed by cross-flow technique as described in Example 1. During mixing, a 2:1 ratio of aqueous to organic solvent was maintained using differential flow rates. Diluted LNPs were concentrated using tangential flow filtration and then buffer exchanged by diafiltration prior to filtering and storage.

Cas9 mRNA and gRNA Cargos

[0856] Capped and polyadenylated Cas9 mRNA was generated by in vitro transcription using a linearized plasmid DNA template and T7 RNA polymerase using the method described in Example 1.

### Genomic DNA Isolation

[0857] Genomic DNA was extracted from liver samples using 50 μL/well BuccalAmp DNA Extraction solution (Epicentre, Cat. QE09050) according to manufacturer's protocol. All DNA samples were subjected to PCR and subsequent NGS analysis, as described herein.

### NGS Sequencing

[0858] In brief, to quantitatively determine the efficiency of editing at the target location in the genome, genomic DNA was isolated and deep sequencing was utilized to identify the presence of insertions and deletions introduced by gene editing.

[0859] PCR primers were designed around the target site (e.g., TTR), and the genomic area of interest was amplified. Primer sequences are provided below. Additional PCR was performed according to the manufacturer's protocols (Illumina) to add the necessary chemistry for sequencing. The amplicons were sequenced on an Illumina MiSeq instrument. The reads were aligned to a cyno reference genome (e.g., macFas5) after eliminating those having low quality scores. The resulting files containing the reads were mapped to the reference genome (BAM files), where reads that overlapped the target region of interest were selected and the number of wild type reads versus the number of reads which contain an insertion, substitution, or deletion was calculated.

[0860] The editing percentage (e.g., the “editing efficiency” or “percent editing”) is defined as the total number of sequence reads with insertions or deletions over the total number of sequence reads, including wild type.

### Example 16: Additional Numbered Embodiments

[0861] The following additional embodiments are provided.

[0862] Embodiment A1 is a composition comprising:

(i) a nucleic acid comprising an open reading frame encoding an RNA-guided DNA binding agent, wherein:
a. the open reading frame comprises a sequence with at least 93% identity to SEQ ID NO: 311; and/or
b. the open reading frame has at least 93% identity to SEQ ID NO: 311 over at least its first 50, 200, 250, or 300 nucleotides, or at least 95% identity to SEQ ID NO: 311 over at least its first 30, 50, 70, 100, 150, 200, 250, or 300 nucleotides; and/or
c. the open reading frame consists of a set of codons of which at least 95%, 96%, 97%, 98%, 99%, 99.5%, or 100% of the codons are codons listed in Table 4, the low A set of Table 5, or the low A/U set of Table 5; and/or
d. the open reading frame has an adenine content ranging from its minimum adenine content to 123% of the minimum adenine content; and/or
e. the open reading frame has an adenine dinucleotide content ranging from its minimum adenine dinucleotide content to 150% of the minimum adenine dinucleotide content; and
(ii) a guide RNA or a vector encoding a guide RNA, wherein the guide RNA comprises a guide sequence selected from SEQ ID NOs: 5-72, 74-78, and 80-82.

[0863] Embodiment A2 is a method of modifying the TTR gene and/or inducing a double-stranded break (DSB) within the TTR gene, comprising delivering a composition to a cell, wherein the composition comprises:

(i) a nucleic acid comprising an open reading frame encoding an RNA-guided DNA binding agent, wherein:
a. the open reading frame comprises a sequence with at least 93% identity to SEQ ID NO:311; and/or
b. the open reading frame has at least 93% identity to SEQ ID NO: 311 over at least its first 50, 200, 250, or 300 nucleotides, or at least 95% identity to SEQ ID NO: 311 over at least its first 30, 50, 70, 100, 150, 200, 250, or 300 nucleotides; and/or
c. the open reading frame consists of a set of codons of which at least 95%, 96%, 97%, 98%, 99%, 99.5%, or 100% of the codons are codons listed in Table 4, the low A set of Table 5, or the low A/U set of Table 5; and/or
d. the open reading frame has an adenine content ranging from its minimum adenine content to 123% of the minimum adenine content; and/or
e. the open reading frame has an adenine dinucleotide content ranging from its minimum adenine dinucleotide content to 150% of the minimum adenine dinucleotide content; and
(ii) a guide RNA or a vector encoding a guide RNA, wherein the guide RNA comprises a guide sequence selected from SEQ ID NOs: 5-72, 74-78, and 80-82.

[0864] Embodiment A3 is a method of reducing TTR serum concentration, treating amyloidosis associated with TTR (ATTR), and/or reducing or preventing the accumulation of amyloids or amyloid fibrils comprising TTR in a subject, comprising administering a composition to a subject in need thereof, wherein the composition comprises:

(i) a nucleic acid comprising an open reading frame encoding an RNA-guided DNA binding agent, wherein:
[0865] a. the open reading frame comprises a sequence with at least 95% identity to SEQ ID NO:311; and/or
   b. the open reading frame has at least 95% identity to SEQ ID NO: 311 over at least its first 30, 50, 70, 100, 150, 200, 250, or 300 nucleotides; and/or
[0866] c. the open reading frame consists of a set of codons of which at least 95%, 96%, 97%, 98%, 99%, 99.5%, or 100% of the codons are codons listed in Table 4, the low A set of Table 5, or the low A/U set of Table 5; and/or
   d. the open reading frame has an adenine content ranging from its minimum adenine content to 150% of the minimum adenine content; and/or
   e. the open reading frame has an adenine dinucleotide content ranging from its minimum adenine dinucleotide content to 150% of the minimum adenine dinucleotide content; and
   (ii) a guide RNA or a vector encoding a guide RNA, wherein the guide RNA comprises a guide sequence selected from SEQ ID NOs: 5-72, 74-78, and 80-82, thereby reducing TTR serum concentration, treating amyloidosis associated with TTR (ATTR), and/or reducing or preventing the accumulation of amyloids or amyloid fibrils comprising TTR in the subject.

[0867] Embodiment A4 is the composition or method of any one of the preceding embodiments, wherein the guide RNA comprises a guide sequence selected from SEQ ID NOs: 5, 6, 7, 8, 9, 12, 13, 14, 15, 16, 17, 22, 23, 27, 29, 30, 35, 36, 37, 38, 55, 61, 63, 65, 66, 68, or 69.

[0868] Embodiment A5 is the composition of embodiment A1 or A4, for use in inducing a double-stranded break (DSB) within the TTR gene in a cell or subject.

[0869] Embodiment A6 is the composition of embodiment A1, A4, or A5 for use in modifying the TTR gene in a cell or subject.

[0870] Embodiment A7 is the composition of embodiment A1, A4, A5, or A6 for use in treating amyloidosis associated with TTR (ATTR) in a subject.

[0871] Embodiment A8 is the composition of embodiment A1, A4, A5, A6, or A7 for use in reducing TTR serum concentration in a subject.

[0872] Embodiment A9 is the composition of embodiment A1, A4, A5, A6, A7, or A8, for use in reducing or preventing the accumulation of amyloids or amyloid fibrils in a subject.

[0873] Embodiment A10 is the composition for use or method of any one of embodiments A2-A9, wherein the method comprises administering the composition by infusion for more than 30 minutes.

[0874] Embodiment A11 is the method or composition for use of embodiment A10, wherein the composition is administered by infusion for about 45-75 minutes, 75-105 minutes, 105-135 minutes, 135-165 minutes, 165-195 minutes, 195-225 minutes, 225-255 minutes, 255-285 minutes, 285-315 minutes, 315-345 minutes, or 345-375 minutes.

[0875] Embodiment A12 is the method or composition for use of embodiment A10 or 11, wherein the composition is administered by infusion for about 1.5-6 hours.

[0876] Embodiment A13 is the method or composition for use of embodiment A10, wherein the composition is administered by infusion for about 60 minutes, about 90 minutes, about 120 minutes, about 150 minutes, about 180 minutes, or about 240 minutes.

[0877] Embodiment A14 is the method or composition for use of embodiment A10, wherein the composition is administered by infusion for about 120 minutes.

[0878] Embodiment A15 is the method or composition for use of any one of embodiments A2-A14, wherein the composition reduces serum TTR levels.

[0879] Embodiment A16 is the method or composition for use of embodiment A15, wherein the serum TTR levels are reduced by at least 50% as compared to serum TTR levels before administration of the composition.

[0880] Embodiment A17 is the method or composition for use of embodiment A151, wherein the serum TTR levels are reduced by 50-60%, 60-70%, 70-80%, 80-90%, 90-95%, 95-98%, 98-99%, or 99-100% as compared to serum TTR levels before administration of the composition.

[0881] Embodiment Alb is the method or composition for use of any one of embodiments A2-17, wherein the composition results in editing of the TTR gene.

[0882] Embodiment A19 is the method or composition for use of embodiment A18, wherein the editing is calculated as a percentage of the population that is edited (percent editing).

[0883] Embodiment A20 is the method or composition for use of embodiment A19, wherein the percent editing is between 30 and 99% of the population.

[0884] Embodiment A21 is the method or composition for use of embodiment A19, wherein the percent editing is between 30 and 35%, 35 and 40%, 40 and 45%, 45 and 50%, 50 and 55%, 55 and 60%, 60 and 65%, 65 and 70%, 70 and 75%, 75 and 80%, 80 and 85%, 85 and 90%, 90 and 95%, or 95 and 99% of the population.

[0885] Embodiment A22 is the method or the composition for use of any one of embodiments A2-A21, wherein the composition reduces amyloid deposition in at least one tissue.

[0886] Embodiment A23 is the method or composition for use of embodiment A22, wherein the at least one tissue comprises one or more of stomach, colon, sciatic nerve, or dorsal root ganglion.

[0887] Embodiment A24 is the method or composition for use of embodiment A22 or 23, wherein amyloid deposition is measured 8 weeks after administration of the composition.

[0888] Embodiment A25 is the method or composition for use of any one of embodiments A22-A24, wherein amyloid deposition is compared to a negative control or a level measured before administration of the composition.

[0889] Embodiment A26 is the method or composition for use of any one of embodiments A22-A25, wherein amyloid deposition is measured in a biopsy sample and/or by immunostaining.

[0890] Embodiment A27 is the method or composition for use of any one of embodiments A22-A26, wherein amyloid deposition is reduced by between 30 and 35%, 35 and 40%, 40 and 45%, 45 and 50%, 50 and 55%, 55 and 60%, 60 and 65%, 65 and 70%, 70 and 75%, 75 and 80%, 80 and 85%, 85 and 90%, 90 and 95%, or 95 and 99% of the amyloid deposition seen in a negative control.

[0891] Embodiment A28 is the method or composition for use of any one of embodiments A22-A27, wherein amyloid deposition is reduced by between 30 and 35%, 35 and 40%, 40 and 45%, 45 and 50%, 50 and 55%, 55 and 60%, 60 and 65%, 65 and 70%, 70 and 75%, 75 and 80%, 80 and 85%, 85 and 90%, 90 and 95%, or 95 and 99% of the amyloid deposition seen before administration of the composition.

[0892] Embodiment A29 is the method or composition for use of any one of embodiments A2-A28, wherein the composition is administered or delivered at least two times.

[0893] Embodiment A30 is the method or composition for use of embodiment A29, wherein the composition is administered or delivered at least three times.

[0894] Embodiment A31 is the method or composition for use of embodiment A29, wherein the composition is administered or delivered at least four times.

[0895] Embodiment A32 is the method or composition for use of embodiment A29, wherein the composition is administered or delivered up to five, six, seven, eight, nine, or ten times.

[0896] Embodiment A33 is the method or composition for use of any one of embodiments A29-A32, wherein the administration or delivery occurs at an interval of 1, 2, 3, 4, 5, 6, 7, 8, 9, 10, 11, 12, 13, 14, or 15 days.

[0897] Embodiment A34 is the method or composition for use of any one of embodiments A29-A32, wherein the administration or delivery occurs at an interval of 1, 2, 3, 4, 5, 6, 7, 8, 9, 10, 11, 12, 13, 14, or 15 weeks.

[0898] Embodiment A35 is the method or composition for use of any one of embodiments A29-A32, wherein the administration or delivery occurs at an interval of 1, 2, 3, 4, 5, 6, 7, 8, 9, 10, 11, 12, 13, 14, or 15 months.

[0899] Embodiment A36 is the method or composition of any one of the preceding embodiments, wherein the guide RNA comprises a crRNA that comprises the guide sequence and further comprises a nucleotide sequence of SEQ ID NO: 126, wherein the nucleotides of SEQ ID NO: 126 follow the guide sequence at its 3′ end.

[0900] Embodiment A37 is the method or composition of any one of the preceding embodiments, wherein the guide RNA is a dual guide (dgRNA).

[0901] Embodiment A38 is the method or composition of embodiment A37, wherein the dual guide RNA comprises a crRNA comprising a nucleotide sequence of SEQ ID NO: 126, wherein the nucleotides of SEQ ID NO: 126 follow the guide sequence at its 3′ end, and a trRNA.

[0902] Embodiment A39 is the method or composition of any one of embodiments A1-A36, wherein the guide RNA is a single guide (sgRNA).

[0903] Embodiment A40 is the method or composition of embodiment A39, wherein the sgRNA comprises a guide sequence that has the pattern of SEQ ID NO: 3.

[0904] Embodiment A41 is the method or composition of embodiment A39, wherein the sgRNA comprises the sequence of SEQ ID NO: 3.

[0905] Embodiment A42 is the method or composition of any one of embodiments A39-A41, wherein the sgRNA comprises any one of the guide sequences of SEQ ID NOs: 5-72, 74-78, and 80-82 and the nucleotides of SEQ ID NO: 126.

[0906] Embodiment A43 is the method or composition of any one of embodiments A39-A42, wherein the sgRNA comprises a sequence that is at least 99%, 98%, 97%, 96%, 95%, 94%, 93%, 92%, 91%, or 90% identical to a sequence selected from SEQ ID Nos: 87-113, 115-120, and 122-124.

[0907] Embodiment A44 is the method or composition of embodiment A39, wherein the sgRNA comprises a sequence selected from SEQ ID Nos: 87-113, 115-120, and 122-124.

[0908] Embodiment A45 is the method or composition of any one of the preceding embodiments, wherein the guide RNA comprises at least one modification.

[0909] Embodiment A46 is the method or composition of embodiment A45, wherein the at least one modification includes a 2′-O-methyl (2′-O-Me) modified nucleotide.

[0910] Embodiment A47 is the method or composition of embodiment A45 or 46, wherein the at least one modification includes a phosphorothioate (PS) bond between nucleotides.

[0911] Embodiment A48 is the method or composition of any one of embodiments A45-A47, wherein the at least one modification includes a 2′-fluoro (2′-F) modified nucleotide.

[0912] Embodiment A49 is the method or composition of any one of embodiments A45-A48, wherein the at least one modification includes a modification at one or more of the first five nucleotides at the 5′ end.

[0913] Embodiment A50 is the method or composition of any one of embodiments A45-A49, wherein the at least one modification includes a modification at one or more of the last five nucleotides at the 3′ end.

[0914] Embodiment A51 is the method or composition of any one of embodiments A45-A50, wherein the at least one modification includes PS bonds between the first four nucleotides.

[0915] Embodiment A52 is the method or composition of any one of embodiments A45-A51, wherein the at least one modification includes PS bonds between the last four nucleotides.

[0916] Embodiment A53 is the method or composition of any one of embodiments A45-A52, wherein the at least one modification includes 2′-O-Me modified nucleotides at the first three nucleotides at the 5′ end.

[0917] Embodiment A54 is The method or composition of any one of embodiments A45-A53, wherein the at least one modification includes 2′-O-Me modified nucleotides at the last three nucleotides at the 3′ end.

[0918] Embodiment A55 is the method or composition of any one of embodiments A45-A54, wherein the guide RNA comprises the modified nucleotides of SEQ ID NO: 3.

[0919] Embodiment A56 is the method or composition of any one of embodiments A1-A55, wherein the composition further comprises a pharmaceutically acceptable excipient.

[0920] Embodiment A57 is the method or composition of any one of embodiments A1-A56, wherein the guide RNA and the nucleic acid comprising an open reading frame encoding an RNA-guided DNA binding agent are associated with a lipid nanoparticle (LNP).

[0921] Embodiment A58 is the method or composition of embodiment A57, wherein the LNP comprises a CCD lipid.

[0922] Embodiment A59 is the method or composition of embodiment A58, wherein the CCD lipid is Lipid A or Lipid B, optionally wherein the CCD lipid is lipid A.

[0923] Embodiment A60 is the method or composition of any one of embodiments A57-A59, wherein the LNP comprises a helper lipid.

[0924] Embodiment A61 is the method or composition of embodiment A60, wherein the helper lipid is cholesterol.

[0925] Embodiment A62 is the method or composition of any one of embodiments A57-A61, wherein the LNP comprises a stealth lipid (e.g., a PEG lipid).

[0926] Embodiment A63 is the method or composition of embodiment A62, wherein the stealth lipid is PEG2k-DMG.

[0927] Embodiment A64 is the method or composition of any one of embodiments A57-A63, wherein:

(i) the LNP comprises a lipid component and the lipid component comprises: about 50-60 mol-% amine lipid such as Lipid A, about 8-10 mol-% neutral lipid; and about 2.5-4 mol-% stealth lipid (e.g., a PEG lipid), wherein the remainder of the lipid component is helper lipid, and wherein the N/P ratio of the LNP composition is about 6;
(ii) the LNP comprises about 50-60 mol-% amine lipid such as Lipid A; about 27-39.5 mol-% helper lipid; about 8-10 mol-% neutral lipid; and about 2.5-4 mol-% stealth lipid (e.g., a PEG lipid), wherein the N/P ratio of the LNP composition is about 5-7 (e.g., about 6);
(iii) the LNP comprises a lipid component and the lipid component comprises: about 50-60 mol-% amine lipid such as Lipid A; about 5-15 mol-% neutral lipid; and about 2.5-4 mol-% Stealth lipid (e.g., a PEG lipid), wherein the remainder of the lipid component is helper lipid, and wherein the N/P ratio of the LNP composition is about 3-10;
(iv) the LNP comprises a lipid component and the lipid component comprises: about 40-60 mol-% amine lipid such as Lipid A; about 5-15 mol-% neutral lipid; and about 2.5-4 mol-% Stealth lipid (e.g., a PEG lipid), wherein the remainder of the lipid component is helper lipid, and wherein the N/P ratio of the LNP composition is about 6;
(v) the LNP comprises a lipid component and the lipid component comprises: about 50-60 mol-% amine lipid such as Lipid A; about 5-15 mol-% neutral lipid; and about 1.5-10 mol-% Stealth lipid (e.g., a PEG lipid), wherein the remainder of the lipid component is helper lipid, and wherein the N/P ratio of the LNP composition is about 6;
(vi) the LNP comprises a lipid component and the lipid component comprises: about 40-60 mol-% amine lipid such as Lipid A; about 0-10 mol-% neutral lipid; and about 1.5-10 mol-% Stealth lipid (e.g., a PEG lipid), wherein the remainder of the lipid component is helper lipid, and wherein the N/P ratio of the LNP composition is about 3-10;
(vii) the LNP comprises a lipid component and the lipid component comprises: about 40-60 mol-% amine lipid such as Lipid A; less than about 1 mol-% neutral lipid; and about 1.5-10 mol-% Stealth lipid (e.g., a PEG lipid), wherein the remainder of the lipid component is helper lipid, and wherein the N/P ratio of the LNP composition is about 3-10;
(viii) the LNP comprises a lipid component and the lipid component comprises: about 40-60 mol-% amine lipid such as Lipid A; and about 1.5-10 mol-% Stealth lipid (e.g., a PEG lipid), wherein the remainder of the lipid component is helper lipid, wherein the N/P ratio of the LNP composition is about 3-10, and wherein the LNP composition is essentially free of or free of neutral phospholipid; or
(ix) the LNP comprises a lipid component and the lipid component comprises: about 50-60 mol-% amine lipid such as Lipid A; about 8-10 mol-% neutral lipid; and about 2.5-4 mol-% Stealth lipid (e.g., a PEG lipid), wherein the remainder of the lipid component is helper lipid, and wherein the N/P ratio of the LNP composition is about 3-7.

[0928] Embodiment A64a is the method or composition of embodiment A64, wherein the mol-% PEG lipid is about 3.

[0929] Embodiment A64b is the method or composition of embodiment A64 or A64a, wherein the mol-% amine lipid is about 50.

[0930] Embodiment A64c is the method or composition of any one of embodiments A64-A64b, wherein the mol-% amine lipid is about 55.

[0931] Embodiment A64d is the method or composition of any one of embodiments A64-A64c, wherein the mol-% amine lipid is ±3 mol-%.

[0932] Embodiment A64e is the method or composition of any one of embodiments A64-A64d, wherein the mol-% amine lipid is ±2 mol-%.

[0933] Embodiment A64f is the method or composition of any one of embodiments A64-A64e, wherein the mol-% amine lipid is 47-53 mol-%.

[0934] Embodiment A64g is the method or composition of any one of embodiments A64-A64f, wherein the mol-% amine lipid is 48-53 mol-%.

[0935] Embodiment A64h is the method or composition of any one of embodiments A64-A64g, wherein the mol-% amine lipid is 53-57 mol-%.

[0936] Embodiment A64i is the method or composition of any one of embodiments A64-A64h, wherein the N/P ratio is 6±1.

[0937] Embodiment A64j is the method or composition of any one of embodiments A64-A64i, wherein the N/P ratio is 6±0.5.

[0938] Embodiment A64k is the method or composition of any one of embodiments A64-A64j, wherein the amine lipid is Lipid A.

[0939] Embodiment A64l is the method or composition of any one of embodiments A64-A64l, wherein the amine lipid is an analog of Lipid A.

[0940] Embodiment A64m is the method or composition of embodiment A64l, wherein the analog is an acetal analog.

[0941] Embodiment A64n is the method or composition of embodiment A64m, wherein the acetal analog is a C4-C12 acetal analog.

[0942] Embodiment A64o is the method or composition of embodiment A64m, wherein the acetal analog is a C5-C12 acetal analog.

[0943] Embodiment A64p is the method or composition of embodiment A64m, wherein the acetal analog is a C5-C10 acetal analog.

[0944] Embodiment A64q is the method or composition of embodiment A64m, wherein the acetal analog is chosen from a C4, C5, C6, C7, C9, C10, C11, and C12 analog.

[0945] Embodiment A64r is the method or composition of any one of embodiments A64-A64q, wherein the helper lipid is cholesterol.

[0946] Embodiment A64s is the method or composition of any one of embodiments A64-A64r, wherein the neutral lipid is DSPC.

[0947] Embodiment A64t is the method or composition of any one of embodiments A64-A64s, wherein the neutral lipid is DPPC.

[0948] Embodiment A64u is the method or composition of any one of embodiments A64-A64t, wherein the PEG lipid comprises dimyristoylglycerol (DMG).

[0949] Embodiment A64v is the method or composition of any one of embodiments A64-A64u, wherein the PEG lipid comprises a PEG-2k.

[0950] Embodiment A64w is the method or composition of any one of embodiments A64-A64v, wherein the PEG lipid is a PEG-DMG.

[0951] Embodiment A64x is the method or composition of embodiment A64w, wherein the PEG-DMG is a PEG2k-DMG.

[0952] Embodiment A64y is the method or composition of any one of embodiments A64-A64x, wherein the LNP composition is essentially free of neutral lipid.

[0953] Embodiment A64z is the method or composition of embodiment A64y, wherein the neutral lipid is a phospholipid.

[0954] Embodiment A65 is the method or composition of any one of embodiments A57-A64z, wherein the LNP comprises a neutral lipid, optionally wherein the neutral lipid is DSPC.

[0955] Embodiment A66 is the method or composition of any one of embodiments A64-A65, wherein the amine lipid is present at about 50 mol-%.

[0956] Embodiment A67 is the method or composition of any one of embodiments A64-A66, wherein the neutral lipid is present at about 9 mol-%.

[0957] Embodiment A68 is the method or composition of any one of embodiments A62-A67, wherein the stealth lipid is present at about 3 mol-%.

[0958] Embodiment A69 is the method or composition of any one of embodiments A60-A68, wherein the helper lipid is present at about 38 mol-%.

[0959] Embodiment A70 is the method or composition of any one of the preceding embodiments, wherein the LNP has an N/P ratio of about 6.

[0960] Embodiment A71 is the method or composition of embodiment A70, wherein the LNP comprises a lipid component and the lipid component comprises: about 50 mol-% amine lipid such as Lipid A; about 9 mol-% neutral lipid such as DSPC; about 3 mol-% of stealth lipid such as a PEG lipid, such as PEG2k-DMG, and the remainder of the lipid component is helper lipid such as cholesterol wherein the N/P ratio of the LNP composition is about 6.

[0961] Embodiment A72 is the method or composition of any one of embodiments A64-A71, wherein the amine lipid is Lipid A.

[0962] Embodiment A73 is the method or composition of any one of embodiments A64-A72, wherein the neutral lipid is DSPC.

[0963] Embodiment A74 is the method or composition of any one of embodiments A62-A73, wherein the stealth lipid is PEG2k-DMG.

[0964] Embodiment A75 is the method or composition of any one of embodiments A60-A74, wherein the helper lipid is cholesterol.

[0965] Embodiment A76 is the method or composition of any one of embodiments A70, wherein the LNP comprises a lipid component and the lipid component comprises: about 50 mol-% Lipid A; about 9 mol-% DSPC; about 3 mol-% of PEG2k-DMG, and the remainder of the lipid component is cholesterol wherein the N/P ratio of the LNP composition is about 6.

[0966] Embodiment A77 is the method or composition of any one of the preceding embodiments, wherein the RNA-guided DNA binding agent is a Cas cleavase.

[0967] Embodiment A78 is the method or composition of embodiment A77, wherein the RNA-guided DNA binding agent is Cas9.

[0968] Embodiment A79 is the method or composition of any one of the preceding embodiments, wherein the RNA-guided DNA binding agent is modified.

[0969] Embodiment A80 is the method or composition of embodiment A79, wherein the modified RNA-guided DNA binding agent comprises a nuclear localization signal (NLS).

[0970] Embodiment A81 is the method or composition of any one of the preceding embodiments, wherein the RNA-guided DNA binding agent is a Cas from a Type-II CRISPR/Cas system.

[0971] Embodiment A82 is the method or composition of any one of the preceding embodiments, wherein the composition is a pharmaceutical formulation and further comprises a pharmaceutically acceptable carrier.

[0972] Embodiment A83 is the method or composition for use of any one of embodiments A2-A82, wherein the composition reduces or prevents amyloids or amyloid fibrils comprising TTR.

[0973] Embodiment A84 is the method or composition for use of embodiment A83, wherein the amyloids or amyloid fibrils are in the nerves, heart, or gastrointestinal track.

[0974] Embodiment A85 is the method or composition for use of any one of embodiments A2-A84, wherein non-homologous ending joining (NHEJ) leads to a mutation during repair of a DSB in the TTR gene.

[0975] Embodiment A86 is the method or composition for use of embodiment A85, wherein NHEJ leads to a deletion or insertion of a nucleotide(s) during repair of a DSB in the TTR gene.

[0976] Embodiment A87 is the method or composition for use of embodiment A86, wherein the deletion or insertion of a nucleotide(s) induces a frame shift or nonsense mutation in the TTR gene.

[0977] Embodiment A88 is the method or composition for use of embodiment A86, wherein a frame shift or nonsense mutation is induced in the TTR gene of at least 50% of liver cells.

[0978] Embodiment A89 is the method or composition for use of embodiment A88, wherein a frame shift or nonsense mutation is induced in the TTR gene of 50%-60%, 60%-70%, 70% or 80%, 80%-90%, 90-95%, 95%-99%, or 99%-100% of liver cells.

[0979] Embodiment A90 is the method or composition for use of any one of embodiments A86-A89, wherein a deletion or insertion of a nucleotide(s) occurs in the TTR gene at least 50-fold or more than in off-target sites.

[0980] Embodiment A91 is the method or composition for use of embodiment A90, wherein the deletion or insertion of a nucleotide(s) occurs in the TTR gene 50-fold to 150-fold, 150-fold to 500-fold, 500-fold to 1500-fold, 1500-fold to 5000-fold, 5000-fold to 15000-fold, 15000-fold to 30000-fold, or 30000-fold to 60000-fold more than in off-target sites.

[0981] Embodiment A92 is the method or composition for use of any one of embodiments A86-A91, wherein the deletion or insertion of a nucleotide(s) occurs at less than or equal to 3, 2, 1, or 0 off-target site(s) in primary human hepatocytes, optionally wherein the off-target site(s) does (do) not occur in a protein coding region in the genome of the primary human hepatocytes.

[0982] Embodiment A93 is the method or composition for use of embodiment A92, wherein the deletion or insertion of a nucleotide(s) occurs at a number of off-target sites in primary human hepatocytes that is less than the number of off-target sites at which a deletion or insertion of a nucleotide(s) occurs in Cas9-overexpressing cells, optionally wherein the off-target site(s) does (do) not occur in a protein coding region in the genome of the primary human hepatocytes.

[0983] Embodiment A94 is the method or composition for use of embodiment A93, wherein the Cas9-overexpressing cells are HEK293 cells stably expressing Cas9.

[0984] Embodiment A95 is the method or composition for use of any one of embodiments A92-A94, wherein the number of off-target sites in primary human hepatocytes is determined by analyzing genomic DNA from primary human hepatocytes transfected in vitro with Cas9 mRNA and the guide RNA, optionally wherein the off-target site(s) does (do) not occur in a protein coding region in the genome of the primary human hepatocytes.

[0985] Embodiment A96 is the method or composition for use of any one of embodiments A92-A94, wherein the number of off-target sites in primary human hepatocytes is determined by an oligonucleotide insertion assay comprising analyzing genomic DNA from primary human hepatocytes transfected in vitro with Cas9 mRNA, the guide RNA, and a donor oligonucleotide, optionally wherein the off-target site(s) does (do) not occur in a protein coding region in the genome of the primary human hepatocytes.

[0986] Embodiment A97 is the method or composition of any one of embodiments A1-A36 or A39-A96, wherein the sequence of the guide RNA is:
[0987] a) SEQ ID NO: 92 or 104;
[0988] b) SEQ ID NO: 87, 89, 96, or 113;
[0989] c) SEQ ID NO: 100, 102, 106, 111, or 112; or
[0990] d) SEQ ID NO: 88, 90, 91, 93, 94, 95, 97, 101, 103, 108, or 109.

[0991] Embodiment A98 is the method or composition of embodiment A97, wherein the guide RNA does not produce indels at off-target site(s) that occur in a protein coding region in the genome of primary human hepatocytes.

[0992] Embodiment A99 is the method or composition for use of any one of embodiments A2-98, wherein administering the composition reduces levels of TTR in the subject.

[0993] Embodiment A100 is the method or composition for use of embodiment A99, wherein the levels of TTR are reduced by at least 50%.

[0994] Embodiment A101 is the method or composition for use of embodiment A100, wherein the levels of TTR are reduced by 50%-60%, 60%-70%, 70% or 80%, 80%-90%, 90-95%, 95%-99%, or 99%-100%.

[0995] Embodiment A102 is the method or composition for use of embodiment A100 or A101, wherein the levels of TTR are measured in serum, plasma, blood, cerebral spinal fluid, or sputum.

[0996] Embodiment A103 is the method or composition for use of embodiment A100 or A101, wherein the levels of TTR are measured in liver, choroid plexus, and/or retina.

[0997] Embodiment A104 is the method or composition for use of any one of embodiments A99-A103, wherein the levels of TTR are measured via enzyme-linked immunosorbent assay (ELISA).

[0998] Embodiment A105 is the method or composition for use of any one of embodiments A2-A104, wherein the subject has ATTR.

[0999] Embodiment A106 is the method or composition for use of any one of embodiments A2-A105, wherein the subject is human.

[1000] Embodiment A107 is the method or composition for use of embodiment A105 or 106, wherein the subject has ATTRwt.

[1001] Embodiment A108 is the method or composition for use of embodiment A105 or 106, wherein the subject has hereditary ATTR.

[1002] Embodiment A109 is the method or composition for use of any one of embodiments A2-A106 or A108, wherein the subject has a family history of ATTR.

[1003] Embodiment A110 is the method or composition for use of any one of embodiments A2-A106 or A108-A109, wherein the subject has familial amyloid polyneuropathy.

[1004] Embodiment A111 is the method or composition for use of any one of embodiments A2-A110, wherein the subject has only or predominantly nerve symptoms of ATTR.

[1005] Embodiment A112 is the method or composition for use of any one of embodiments A2-A111, wherein the subject has familial amyloid cardiomyopathy.

[1006] Embodiment A113 is the method or composition for use of any one of embodiments A2-A110 or 112, wherein the subject has only or predominantly cardiac symptoms of ATTR.

[1007] Embodiment A114 is the method or composition for use of any one of embodiments A2-A113, wherein the subject expresses TTR having a V30 mutation.

[1008] Embodiment A115 is the method or composition for use of embodiment A114, wherein the V30 mutation is V30A, V30G, V30L, or V30M.

[1009] Embodiment A116 is the method or composition for use of embodiment A any one of embodiments A2-A113, wherein the subject expresses TTR having a T60 mutation.

[1010] Embodiment A117 is the method or composition for use of embodiment A116, wherein the T60 mutation is T60A.

[1011] Embodiment A118 is the method or composition for use of embodiment A any one of embodiments A2-A113, wherein the subject expresses TTR having a V122 mutation.

[1012] Embodiment A119 is the method or composition for use of embodiment A118, wherein the V122 mutation is V122A, V122I, or V122(−).

[1013] Embodiment A120 is the method or composition for use of any one of embodiments A2-A113, wherein the subject expresses wild-type TTR.

[1014] Embodiment A121 is the method or composition for use of any one of embodiments A2-A107, or A120, wherein the subject does not express TTR having a V30, T60, or V122 mutation.

[1015] Embodiment A122 is the method or composition for use of any one of embodiments A2-A107, or A120-A121, wherein the subject does not express TTR having a pathological mutation.

[1016] Embodiment A123 is the method or composition for use of embodiment A122, wherein the subject is homozygous for wild-type TTR.

[1017] Embodiment A124 is the method or composition for use of any one of embodiments A2-A123, wherein after administration the subject has an improvement, stabilization, or slowing of change in symptoms of sensorimotor neuropathy.

[1018] Embodiment A125 is the method or composition for use of embodiment A124, wherein the improvement, stabilization, or slowing of change in sensory neuropathy is measured using electromyogram, nerve conduction tests, or patient-reported outcomes.

[1019] Embodiment A126 is the method or composition for use of any one of embodiments A2-A125, wherein the subject has an improvement, stabilization, or slowing of change in symptoms of congestive heart failure.

[1020] Embodiment A127 is the method or composition for use of embodiment A126, wherein the improvement, stabilization, or slowing of change in congestive heart failure is measured using cardiac biomarker tests, lung function tests, chest x-rays, or electrocardiography.

[1021] Embodiment A128 is the method or composition for use of any one of embodiments A2-A127, wherein the composition or pharmaceutical formulation is administered via a viral vector.

[1022] Embodiment A129 is the method or composition for use of any one of embodiments A2-A127, wherein the composition or pharmaceutical formulation is administered via lipid nanoparticles.

[1023] Embodiment A130 is the method or composition for use of any one of embodiments A2-A129, wherein the subject is tested for specific mutations in the TTR gene before administering the composition or formulation.

[1024] Embodiment A131 is the method or composition of any one of the preceding embodiments, wherein the sequence selected from SEQ ID NOs: 5-72, 74-78, and 80-82 is SEQ ID NO: 5, 6, 9, 13, 14, 15, 16, 17, 22, 23, 27, 30, 35, 36, 37, 38, 55, 63, 65, 66, 68, or 69.

[1025] Embodiment A132 is the method or composition of any one of embodiments A1-A130, wherein the sequence selected from SEQ ID NOs: 5-72, 74-78, and 80-82 is SEQ ID NO: 5. Embodiment A133 is the method or composition of any one of embodiments A1-A130, wherein the sequence selected from SEQ ID NOs: 5-72, 74-78, and 80-82 is SEQ ID NO: 6. Embodiment A134 is the method or composition of any one of embodiments A1-A130, wherein the sequence selected from SEQ ID NOs: 5-72, 74-78, and 80-82 is SEQ ID NO: 7. Embodiment A135 is the method or composition of any one of embodiments A1-A130, wherein the sequence selected from SEQ ID NOs: 5-72, 74-78, and 80-82 is SEQ ID NO: 8. Embodiment A136 is the method or composition of any one of embodiments A1-A130, wherein the sequence selected from SEQ ID NOs: 5-72, 74-78, and 80-82 is SEQ ID NO: 9. Embodiment A137 is the method or composition of any one of embodiments A1-A130, wherein the sequence selected from SEQ ID NOs: 5-72, 74-78, and 80-82 is SEQ ID NO: 10. Embodiment A138 is the method or composition of any one of embodiments A1-A130, wherein the sequence selected from SEQ ID NOs: 5-72, 74-78, and 80-82 is SEQ ID NO: 11. Embodiment A139 is the method or composition of any one of embodiments A1-A130, wherein the sequence selected from SEQ ID NOs: 5-72, 74-78, and 80-82 is SEQ ID NO: 12. Embodiment A140 is the method or composition of any one of embodiments A1-A130, wherein the sequence selected from SEQ ID NOs: 5-72, 74-78, and 80-82 is SEQ ID NO: 13. Embodiment A141 is the method or composition of any one of embodiments A1-A130, wherein the sequence selected from SEQ ID NOs: 5-72, 74-78, and 80-82 is SEQ ID NO: 14. Embodiment A142 is the method or composition of any one of embodiments A1-A130, wherein the sequence selected from SEQ ID NOs: 5-72, 74-78, and 80-82 is SEQ ID NO: 15. Embodiment A143 is the method or composition of any one of embodiments A1-A130, wherein the sequence selected from SEQ ID NOs: 5-72, 74-78, and 80-82 is SEQ ID NO: 16. Embodiment A144 is the method or composition of any one of embodiments A1-A130, wherein the sequence selected from SEQ ID NOs: 5-72, 74-78, and 80-82 is SEQ ID NO: 17. Embodiment A145 is the method or composition of any one of embodiments A1-A130, wherein the sequence selected from SEQ ID NOs: 5-72, 74-78, and 80-82 is SEQ ID NO: 18. Embodiment A146 is the method or composition of any one of embodiments A1-A130, wherein the sequence selected from SEQ ID NOs: 5-72, 74-78, and 80-82 is SEQ ID NO: 19. Embodiment A147 is the method or composition of any one of embodiments A1-A130, wherein the sequence selected from SEQ ID NOs: 5-72, 74-78, and 80-82 is SEQ ID NO: 20. Embodiment A148 is the method or composition of any one of embodiments A1-A130, wherein the sequence selected from SEQ ID NOs: 5-72, 74-78, and 80-82 is SEQ ID NO: 21. Embodiment A149 is the method or composition of any one of embodiments A1-A130, wherein the sequence selected from SEQ ID NOs: 5-72, 74-78, and 80-82 is SEQ ID NO: 22. Embodiment A150 is the method or composition of any one of embodiments A1-A130, wherein the sequence selected from SEQ ID NOs: 5-72, 74-78, and 80-82 is SEQ ID NO: 23. Embodiment A151 is the method or composition of any one of embodiments A1-A130, wherein the sequence selected from SEQ ID NOs: 5-72, 74-78, and 80-82 is SEQ ID NO: 24. Embodiment A152 is the method or composition of any one of embodiments A1-A130, wherein the sequence selected from SEQ ID NOs: 5-72, 74-78, and 80-82 is SEQ ID NO: 25. Embodiment A153 is the method or composition of any one of embodiments A1-A130, wherein the sequence selected from SEQ ID NOs: 5-72, 74-78, and 80-82 is SEQ ID NO: 26. Embodiment A154 is the method or composition of any one of embodiments A1-A130, wherein the sequence selected from SEQ ID NOs: 5-72, 74-78, and 80-82 is SEQ ID NO: 27. Embodiment A155 is the method or composition of any one of embodiments A1-A130, wherein the sequence selected from SEQ ID NOs: 5-72, 74-78, and 80-82 is SEQ ID NO: 28. Embodiment A156 is the method or composition of any one of embodiments A1-A130, wherein the sequence selected from SEQ ID NOs: 5-72, 74-78, and 80-82 is SEQ ID NO: 29. Embodiment A157 is the method or composition of any one of embodiments A1-A130, wherein the sequence selected from SEQ ID NOs: 5-72, 74-78, and 80-82 is SEQ ID NO: 30. Embodiment A158 is the method or composition of any one of embodiments A1-A130, wherein the sequence selected from SEQ ID NOs: 5-72, 74-78, and 80-82 is SEQ ID NO: 31. Embodiment A159 is the method or composition of any one of embodiments A1-A130, wherein the sequence selected from SEQ ID NOs: 5-72, 74-78, and 80-82 is SEQ ID NO: 32. Embodiment A160 is the method or composition of any one of embodiments A1-A130, wherein the sequence selected from SEQ ID NOs: 5-72, 74-78, and 80-82 is SEQ ID NO: 33. Embodiment A161 is the method or composition of any one of embodiments A1-A130, wherein the sequence selected from SEQ ID NOs: 5-72, 74-78, and 80-82 is SEQ ID NO: 34. Embodiment A162 is the method or composition of any one of embodiments A1-A130, wherein the sequence selected from SEQ ID NOs: 5-72, 74-78, and 80-82 is SEQ ID NO: 35. Embodiment A163 is the method or composition of any one of embodiments A1-A130, wherein the sequence selected from SEQ ID NOs: 5-72, 74-78, and 80-82 is SEQ ID NO: 36. Embodiment A164 is the method or composition of any one of embodiments A1-A130, wherein the sequence selected from SEQ ID NOs: 5-72, 74-78, and 80-82 is SEQ ID NO: 37. Embodiment A165 is the method or composition of any one of embodiments A1-A130, wherein the sequence selected from SEQ ID NOs: 5-72, 74-78, and 80-82 is SEQ ID NO: 38. Embodiment A166 is the method or composition of any one of embodiments A1-A130, wherein the sequence selected from SEQ ID NOs: 5-72, 74-78, and 80-82 is SEQ ID NO: 39. Embodiment A167 is the method or composition of any one of embodiments A1-A130, wherein the sequence selected from SEQ ID NOs: 5-72, 74-78, and 80-82 is SEQ ID NO: 40. Embodiment A168 is the method or composition of any one of embodiments A1-A130, wherein the sequence selected from SEQ ID NOs: 5-72, 74-78, and 80-82 is SEQ ID NO: 41. Embodiment A169 is the method or composition of any one of embodiments A1-A130, wherein the sequence selected from SEQ ID NOs: 5-72, 74-78, and 80-82 is SEQ ID NO: 42. Embodiment A170 is the method or composition of any one of embodiments A1-A130, wherein the sequence selected from SEQ ID NOs: 5-72, 74-78, and 80-82 is SEQ ID NO: 43. Embodiment A171 is the method or composition of any one of embodiments A1-A130, wherein the sequence selected from SEQ ID NOs: 5-72, 74-78, and 80-82 is SEQ ID NO: 44. Embodiment A172 is the method or composition of any one of embodiments A1-A130, wherein the sequence selected from SEQ ID NOs: 5-72, 74-78, and 80-82 is SEQ ID NO: 45. Embodiment A173 is the method or composition of any one of embodiments A1-A130, wherein the sequence selected from SEQ ID NOs: 5-72, 74-78, and 80-82 is SEQ ID NO: 46. Embodiment A174 is the method or composition of any one of embodiments A1-A130, wherein the sequence selected from SEQ ID NOs: 5-72, 74-78, and 80-82 is SEQ ID NO: 47. Embodiment A175 is the method or composition of any one of embodiments A1-A130, wherein the sequence selected from SEQ ID NOs: 5-72, 74-78, and 80-82 is SEQ ID NO: 48. Embodiment A176 is the method or composition of any one of embodiments A1-A130, wherein the sequence selected from SEQ ID NOs: 5-72, 74-78, and 80-82 is SEQ ID NO: 49. Embodiment A177 is the method or composition of any one of embodiments A1-A130, wherein the sequence selected from SEQ ID NOs: 5-72, 74-78, and 80-82 is SEQ ID NO: 50. Embodiment A178 is the method or composition of any one of embodiments A1-A130, wherein the sequence selected from SEQ ID NOs: 5-72, 74-78, and 80-82 is SEQ ID NO: 51. Embodiment A179 is the method or composition of any one of embodiments A1-A130, wherein the sequence selected from SEQ ID NOs: 5-72, 74-78, and 80-82 is SEQ ID NO: 52. Embodiment A180 is the method or composition of any one of embodiments A1-A130, wherein the sequence selected from SEQ ID NOs: 5-72, 74-78, and 80-82 is SEQ ID NO: 53. Embodiment A181 is the method or composition of any one of embodiments A1-A130, wherein the sequence selected from SEQ ID NOs: 5-72, 74-78, and 80-82 is SEQ ID NO: 54. Embodiment A182 is the method or composition of any one of embodiments A1-A130, wherein the sequence selected from SEQ ID NOs: 5-72, 74-78, and 80-82 is SEQ ID NO: 55. Embodiment A183 is the method or composition of any one of embodiments A1-A130, wherein the sequence selected from SEQ ID NOs: 5-72, 74-78, and 80-82 is SEQ ID NO: 56. Embodiment A184 is the method or composition of any one of embodiments A1-A130, wherein the sequence selected from SEQ ID NOs: 5-72, 74-78, and 80-82 is SEQ ID NO: 57. Embodiment A185 is the method or composition of any one of embodiments A1-A130, wherein the sequence selected from SEQ ID NOs: 5-72, 74-78, and 80-82 is SEQ ID NO: 58. Embodiment A186 is the method or composition of any one of embodiments A1-A130, wherein the sequence selected from SEQ ID NOs: 5-72, 74-78, and 80-82 is SEQ ID NO: 59. Embodiment A187 is the method or composition of any one of embodiments A1-A130, wherein the sequence selected from SEQ ID NOs: 5-72, 74-78, and 80-82 is SEQ ID NO: 60. Embodiment A188 is the method or composition of any one of embodiments A1-A130, wherein the sequence selected from SEQ ID NOs: 5-72, 74-78, and 80-82 is SEQ ID NO: 61. Embodiment A189 is the method or composition of any one of embodiments A1-A130, wherein the sequence selected from SEQ ID NOs: 5-72, 74-78, and 80-82 is SEQ ID NO: 62. Embodiment A190 is the method or composition of any one of embodiments A1-A130, wherein the sequence selected from SEQ ID NOs: 5-72, 74-78, and 80-82 is SEQ ID NO: 63. Embodiment A191 is the method or composition of any one of embodiments A1-A130, wherein the sequence selected from SEQ ID NOs: 5-72, 74-78, and 80-82 is SEQ ID NO: 64. Embodiment A192 is the method or composition of any one of embodiments A1-A130, wherein the sequence selected from SEQ ID NOs: 5-72, 74-78, and 80-82 is SEQ ID NO: 65. Embodiment A193 is the method or composition of any one of embodiments A1-A130, wherein the sequence selected from SEQ ID NOs: 5-72, 74-78, and 80-82 is SEQ ID NO: 66. Embodiment A194 is the method or composition of any one of embodiments A1-A130, wherein the sequence selected from SEQ ID NOs: 5-72, 74-78, and 80-82 is SEQ ID NO: 67. Embodiment A195 is the method or composition of any one of embodiments A1-A130, wherein the sequence selected from SEQ ID NOs: 5-72, 74-78, and 80-82 is SEQ ID NO: 68. Embodiment A196 is the method or composition of any one of embodiments A1-A130, wherein the sequence selected from SEQ ID NOs: 5-72, 74-78, and 80-82 is SEQ ID NO: 69. Embodiment A197 is the method or composition of any one of embodiments A1-A130, wherein the sequence selected from SEQ ID NOs: 5-72, 74-78, and 80-82 is SEQ ID NO: 70. Embodiment A198 is the method or composition of any one of embodiments A1-A130, wherein the sequence selected from SEQ ID NOs: 5-72, 74-78, and 80-82 is SEQ ID NO: 71. Embodiment A199 is the method or composition of any one of embodiments A1-A130, wherein the sequence selected from SEQ ID NOs: 5-72, 74-78, and 80-82 is SEQ ID NO: 72. Embodiment A200 is the method or composition of any one of embodiments A1-A130, wherein the sequence selected from SEQ ID NOs: 5-72, 74-78, and 80-82 is SEQ ID NO: 74. Embodiment A201 is the method or composition of any one of embodiments A1-A130, wherein the sequence selected from SEQ ID NOs: 5-72, 74-78, and 80-82 is SEQ ID NO: 75. Embodiment A202 is the method or composition of any one of embodiments A1-A130, wherein the sequence selected from SEQ ID NOs: 5-72, 74-78, and 80-82 is SEQ ID NO: 76. Embodiment A203 is the method or composition of any one of embodiments A1-A130, wherein the sequence selected from SEQ ID NOs: 5-72, 74-78, and 80-82 is SEQ ID NO: 77. Embodiment A204 is the method or composition of any one of embodiments A1-A130, wherein the sequence selected from SEQ ID NOs: 5-72, 74-78, and 80-82 is SEQ ID NO: 78. Embodiment A205 is the method or composition of any one of embodiments A1-A130, wherein the sequence selected from SEQ ID NOs: 5-72, 74-78, and 80-82 is SEQ ID NO: 80. Embodiment A206 is the method or composition of any one of embodiments A1-A130, wherein the sequence selected from SEQ ID NOs: 5-72, 74-78, and 80-82 is SEQ ID NO: 81. Embodiment A207 is the method or composition of any one of embodiments A1-A130, wherein the sequence selected from SEQ ID NOs: 5-72, 74-78, and 80-82 is SEQ ID NO: 82. Embodiment A208 is the composition or method of any one of the preceding embodiments, wherein the open reading frame has at least 95% identity to SEQ ID NO: 311 over at least its first 10%, 12%, 15%, 20%, 25%, 30%, or 35% of its sequence.

[1026] Embodiment A209 is the composition or method of any one of the preceding embodiments, wherein the open reading frame comprises a sequence with at least 94%, 95%, 96%, 97%, 98%, 99%, 99.5%, or 100% identity to SEQ ID NO: 311.

[1027] Embodiment A210 is the composition or method of any one of the preceding embodiments, wherein at least 95%, 96%, 97%, 98%, 99%, 99.5%, or 100% of the codons of the open reading frame are codons listed in Table 4, Table 5, or Table 7.

[1028] Embodiment A211 is the composition or method of embodiment A210, wherein the codons listed in Table 4, Table 5, or Table 7 are codons listed in Table 4.

[1029] Embodiment A212 is the composition or method of embodiment A210, wherein the codons listed in Table 4, Table 5, or Table 7 are codons of the Low U codon set of Table 5.

[1030] Embodiment A213 is the composition or method of embodiment A210, wherein the codons listed in Table 4, Table 5, or Table 7 are codons of the Low A codon set of Table 5.

[1031] Embodiment A214 is the composition or method of embodiment A210, wherein the codons listed in Table 4, Table 5, or Table 7 are codons of the Low A/U codon set of Table 5.

[1032] Embodiment A215 is the composition or method of embodiment A210, wherein the codons listed in Table 4, Table 5, or Table 7 are codons listed in Table 7.

[1033] Embodiment A216 is the composition or method of any one of the preceding embodiments, wherein the open reading frame has an adenine content ranging from its minimum adenine content to 101%, 102%, 103%, 105%, 110%, 115%, 120%, or 123% of the minimum adenine content.

[1034] Embodiment A217 is the composition or method of any one of the preceding embodiments, wherein the open reading frame has an adenine dinucleotide content ranging from its minimum adenine dinucleotide content to 101%, 102%, 103%, 105%, 110%, 115%, 120%, 125%, 130%, 135%, 140%, 145%, or 150% of the minimum adenine dinucleotide content.

[1035] Embodiment A218 is the composition or method of any one of the preceding embodiments, wherein the nucleic acid comprises a 5′ UTR with at least 90% identity to any one of SEQ ID NOs: 232, 234, 236, 238, 241, or 275-277.

[1036] Embodiment A219 is the composition or method of any one of the preceding embodiments, wherein the nucleic acid comprises a 3′ UTR with at least 90% identity to any one of SEQ ID NOs: 233, 235, 237, 239, or 240.

[1037] Embodiment A220 is the composition or method of any one of the preceding embodiments, wherein the nucleic acid comprises a 5′ UTR and a 3′ UTR from the same source.

[1038] Embodiment A221 is the composition or method of any one of the preceding embodiments, wherein the nucleic acid is an mRNA comprising a 5′ cap selected from Cap0, Cap1, and Cap2.

[1039] Embodiment A222 is the composition or method of any one of the preceding embodiments, wherein the open reading frame comprises a sequence with at least 95%, 96%, 97%, 98%, 99%, 99.5%, or 100% identity to SEQ ID NO: 377.

[1040] Embodiment A223 is the composition or method of any of the preceding embodiments, wherein the nucleic acid is an mRNA in which at least 10% of the uridine is substituted with a modified uridine.

[1041] Embodiment A224 is the composition or method of embodiment A223, wherein the modified uridine is one or more of N1-methyl-pseudouridine, pseudouridine, 5-methoxyuridine, or 5-iodouridine.

[1042] Embodiment A225 is the composition or method of embodiment A223, wherein the modified uridine is one or both of N1-methyl-pseudouridine or 5-methoxyuridine.

[1043] Embodiment A226 is the composition or method of embodiment A223, wherein the modified uridine is N1-methyl-pseudouridine.

[1044] Embodiment A227 is the composition or method of embodiment A223, wherein the modified uridine is 5-methoxyuridine.

[1045] Embodiment A228 is the composition or method of any one of embodiments A223-A227, wherein 15% to 45% of the uridine in the mRNA is substituted with the modified uridine.

[1046] Embodiment A229 is the composition or method of any one of embodiments A223-A228, wherein at least 20% or at least 30% of the uridine in the mRNA is substituted with the modified uridine.

[1047] Embodiment A230 is the composition or method of embodiment A229, wherein at least 80% or at least 90% of the uridine in the mRNA is substituted with the modified uridine.

[1048] Embodiment A231 is the composition or method of embodiment A229, wherein 100% of the uridine in the mRNA is substituted with the modified uridine.

[1049] Embodiment A232 is a use of a composition or formulation of any of embodiments A1 or A4-A231 for the preparation of a medicament for treating a human subject having ATTR.

Sequence Table
The following sequence table provides a listing of sequences disclosed herein. It is understood that if a DNA sequence (comprising
Ts) is referenced with respect to an RNA, then Ts should be replaced with Us (which may be modified or unmodified depending on the context),
and vice versa.

| Description | Sequence | SEQ ID No. |
|---|---|---|
| Cas9 | GGGTCCCGCAGTCGGCGTCCAGCGGCTCTGCTTGTTCGTGTGTGTGTCGTTGCAGGCCTTATTCGGATCCGCCACCATGGACAAGA | 1 |
| transcript | AGTACAGCATCGGACTGGACATCGGAACAAACAGCGTCGGATGGGCAGTCATCACAGACGAATACAAGGTCCCGAGCAAGAAGTTC | |
| with 5′ UTR | AAGGTCCTGGGAAACACAGACAGACACAGCATCAAGAAGAACCTGATCGGAGCACTGCTGTTCGACAGCGGAGAAACAGCAGAAGC | |
| of HSD, ORF | AACAAGACTGAAGAGAACAGCAAGAAGAAGATACACAAGAAGAAAGAACAGAATCTGCTACCTGCAGGAAATCTTCAGCAACGAAA | |
| corresponding | TGGCAAAGGTCGACGACAGCTTCTTCCACAGACTGGAAGAAAGCTTCCTGGTCGAAGAAGACAAGAAGCACGAAAGACACCCGATC | |
| to SEQ ID | TTCGGAAACATCGTCGACGAAGTCGCATACCACGAAAAGTACCCGACAATCTACCACCTGAGAAAGAAGCTGGTCGACAGCACAGA | |
| NO: 204, | CAAGGCAGACCTGAGACTGATCTACCTGGCACTGGCACACATGATCAAGTTCAGAGGACACTTCCTGATCGAAGGAGACCTGAACC | |
| Kozak | CGGACAACAGCGACGTCGACAAGCTGTTCATCCAGCTGGTCCAGACATACAACCAGCTGTTCGAAGAAAACCCGATCAACGCAAGC | |
| sequence, | GGAGTCGACGCAAAGGCAATCCTGAGCGCAAGACTGAGCAAGAGCAGAAGACTGGAAAACCTGATCGCACAGCTGCCGGGAGAAAA | |
| and 3′ UTR | GAAGAACGGACTGTTCGGAAACCTGATCGCACTGAGCCTGGGACTGACACCGAACTTCAAGAGCAACTTCGACCTGGCAGAAGACG | |
| of ALB | CAAAGCTGCAGCTGAGCAAGGACACATACGACGACGACCTGGACAACCTGCTGGCACAGATCGGAGACCAGTACGCAGACCTGTTC | |
| | CTGGCAGCAAAGAACCTGAGCGACGCAATCCTGCTGAGCGACATCCTGAGAGTCAACACAGAAATCACAAAGGCACCGCTGAGCGC | |
| | AAGCATGATCAAGAGATACGACGAACACCACCAGGACCTGACACTGCTGAAGGCACTGGTCAGACAGCAGCTGCCGGAAAAGTACA | |
| | AGGAAATCTTCTTCGACCAGAGCAAGAACGGATACGCAGGATACATCGACGGAGGAGCAAGCCAGGAAGAATTCTACAAGTTCATC | |
| | AAGCCGATCCTGGAAAAGATGGACGGAACAGAAGAACTGCTGGTCAAGCTGAACAGAGAAGACCTGCTGAGAAAGCAGAGAACATT | |
| | CGACAACGGAAGCATCCCGCACCAGATCCACCTGGGAGAACTGCACGCAATCCTGAGAAGACAGGAAGACTTCTACCCGTTCCTGA | |
| | AGGACAACAGAGAAAAGATCGAAAAGATCCTGACATTCAGAATCCCGTACTACGTCGGACCGCTGGCAAGAGGAAACAGCAGATTC | |
| | GCATGGATGACAAGAAAGAGCGAAGAAACAATCACACCGTGGAACTTCGAAGAAGTCGTCGACAAGGGAGCAAGCGCACAGAGCTT | |
| | CATCGAAAGAATGACAAACTTCGACAAGAACCTGCCGAACGAAAAGGTCCTGCCGAAGCACAGCCTGCTGTACGAATACTTCACAG | |
| | TCTACAACGAACTGACAAAGGTCAAGTACGTCACAGAAGGAATGAGAAAGCCGGCATTCCTGAGCGGAGAACAGAAGAAGGCAATC | |
| | GTCGACCTGCTGTTCAAGACAAACAGAAAGGTCACAGTCAAGCAGCTGAAGGAAGACTACTTCAAGAAGATCGAATGCTTCGACAG | |
| | CGTCGAAATCAGCGGAGTCGAAGACAGATTCAACGCAAGCCTGGGAACATACCACGACCTGCTGAAGATCATCAAGGACAAGGACT | |
| | TCCTGGACAACGAAGAAAACGAAGACATCCTGGAAGACATCGTCCTGACACTGACACTGTTCGAAGACAGAGAAATGATCGAAGAA | |
| | AGACTGAAGACATACGCACACCTGTTCGACGACAAGGTCATGAAGCAGCTGAAGAGAAGAAGATACACAGGATGGGGAAGACTGAG | |
| | CAGAAAGCTGATCAACGGAATCAGAGACAAGCAGAGCGGAAAGACAATCCTGGACTTCCTGAAGAGCGACGGATTCGCAAACAGAA | |
| | ACTTCATGCAGCTGATCCACGACGACAGCCTGACATTCAAGGAAGACATCCAGAAGGCACAGGTCAGCGGACAGGGAGACAGCCTG | |
| | CACGAACACATCGCAAACCTGGCAGGAAGCCCGGCAATCAAGAAGGGAATCCTGCAGACAGTCAAGGTCGTCGACGAACTGGTCAA | |
| | GGTCATGGGAAGACACAAGCCGGAAAACATCGTCATCGAAATGGCAAGAGAAAACCAGACAACACAGAAGGGACAGAAGAACAGCA | |
| | GAGAAAGAATGAAGAGAATCGAAGAAGGAATCAAGGAACTGGGAAGCCAGATCCTGAAGGAACACCCGGTCGAAAACACACAGCTG | |
| | CAGAACGAAAAGCTGTACCTGTACTACCTGCAGAACGGAAGAGACATGTACGTCGACCAGGAACTGGACATCAACAGACTGAGCGA | |
| | CTACGACGTCGACCACATCGTCCCGCAGAGCTTCCTGAAGGACGACAGCATCGACAACAAGGTCCTGACAAGAAGCGACAAGAACA | |
| | GAGGAAAGAGCGACAACGTCCCGAGCGAAGAAGTCGTCAAGAAGATGAAGAACTACTGGAGACAGCTGCTGAACGCAAAGCTGATC | |
| | ACACAGAGAAAGTTCGACAACCTGACAAAGGCAGAGAGAGGAGGACTGAGCGAACTGGACAAGGCAGGATTCATCAAGAGACAGCT | |
| | GGTCGAAACAAGACAGATCACAAAGCACGTCGCACAGATCCTGGACAGCAGAATGAACACAAAGTACGACGAAAACGACAAGCTGA | |
| | TCAGAGAAGTCAAGGTCATCACACTGAAGAGCAAGCTGGTCAGCGACTTCAGAAAGGACTTCCAGTTCTACAAGGTCAGAGAAATC | |
| | AACAACTACCACCACGCACACGACGCATACCTGAACGCAGTCGTCGGAACAGCACTGATCAAGAAGTACCCGAAGCTGGAAAGCGA | |
| | ATTCGTCTACGGAGACTACAAGGTCTACGACGTCAGAAAGATGATCGCAAAGAGCGAACAGGAAATCGGAAAGGCAACAGCAAAGT | |
| | ACTTCTTCTACAGCAACATCATGAACTTCTTCAAGACAGAAATCACACTGGCAAACGGAGAAATCAGAAAGAGACCGCTGATCGAA | |
| | ACAAACGGAGAAACAGGAGAAATCGTCTGGGACAAGGGAAGAGACTTCGCAACAGTCAGAAAGGTCCTGAGCATGCCGCAGGTCAA | |
| | CATCGTCAAGAAGACAGAAGTCCAGACAGGAGGATTCAGCAAGGAAAGCATCCTGCCGAAGAGAAACAGCGACAAGCTGATCGCAA | |
| | GAAAGAAGGACTGGGACCCGAAGAAGTACGGAGGATTCGACAGCCCGACAGTCGCATACAGCGTCCTGGTCGTCGCAAAGGTCGAA | |
| | AAGGGAAAGAGCAAGAAGCTGAAGAGCGTCAAGGAACTGCTGGGAATCACAATCATGGAAAGAAGCAGCTTCGAAAAGAACCCGAT | |
| | CGACTTCCTGGAAGCAAAGGGATACAAGGAAGTCAAGAAGGACCTGATCATCAAGCTGCCGAAGTACAGCCTGTTCGAACTGGAAA | |
| | ACGGAAGAAAGAGAATGCTGGCAAGCGCAGGAGAACTGCAGAAGGGAAACGAACTGGCACTGCCGAGCAAGTACGTCAACTTCCTG | |
| | TACCTGGCAAGCCACTACGAAAAGCTGAAGGGAAGCCCGGAAGACAACGAACAGAAGCAGCTGTTCGTCGAACAGCACAAGCACTA | |
| | CCTGGACGAAATCATCGAACAGATCAGCGAATTCAGCAAGAGAGTCATCCTGGCAGACGCAAACCTGGACAAGGTCCTGAGCGCAT | |
| | ACAACAAGCACAGAGACAAGCCGATCAGAGAACAGGCAGAAAACATCATCCACCTGTTCACACTGACAAACCTGGGAGCACCGGCA | |
| | GCATTCAAGTACTTCGACACAACAATCGACAGAAAGAGATACACAAGCACAAAGGAAGTCCTGGACGCAACACTGATCCACCAGAG | |
| | CATCACAGGACTGTACGAAACAAGAATCGACCTGAGCCAGCTGGGAGGAGACGGAGGAGGAAGCCCGAAGAAGAAGAGAAAGGTCT | |
| | AGCTAGCCATCACATTTAAAAGCATCTCAGCCTACCATGAGAATAAGAGAAAGAAAATGAAGATCAATAGCTTATTCATCTCTTTT | |
| | TCTTTTTCGTTGGTGTAAAGCCAACACCCTGTCTAAAAAACATAAATTTCTTTAATCATTTTGCCTCTTTTCTCTGTGCTTCAATT | |
| | AATAAAAAATGGAAAGAACCTCGAG | |
| Cas9 | GGGTCCCGCAGTCGGCGTCCAGCGGCTCTGCTTGTTCGTGTGTGTGTCGTTGCAGGCCTTATTCGGATCCATGCCTAAGAAAAAGC | 2 |
| transcript | GGAAGGTCGACGGGGATAAGAAGTACTCAATCGGGCTGGATATCGGAACTAATTCCGTGGGTTGGGCAGTGATCACGGATGAATAC | |
| comprising | AAAGTGCCGTCCAAGAAGTTCAAGGTCCTGGGGAACACCGATAGACACAGCATCAAGAAAAATCTCATCGGAGCCCTGCTGTTTGA | |
| Cas9 ORF | CTCCGGCGAAACCGCAGAAGCGACCCGGCTCAAACGTACCGCGAGGCGACGCTACACCCGGCGGAAGAATCGCATCTGCTATCTGC | |
| corresponding | AAGAGATCTTTTCGAACGAAATGGCAAAGGTCGACGACAGCTTCTTCCACCGCCTGGAAGAATCTTTCCTGGTGGAGGAGGACAAG | |
| to SEQ ID | AAGCATGAACGGCATCCTATCTTTGGAAACATCGTCGACGAAGTGGCGTACCACGAAAAGTACCCGACCATCTACCATCTGCGGAA | |
| NO: 205 | GAAGTTGGTTGACTCAACTGACAAGGCCGACCTCAGATTGATCTACTTGGCCCTCGCCCATATGATCAAATTCCGCGGACACTTCC | |
| using codons | TGATCGAAGGCGATCTGAACCCTGATAACTCCGACGTGGATAAGCTTTTCATTCAACTGGTGCAGACCTACAACCAACTGTTCGAA | |
| with | GAAAACCCAATCAATGCTAGCGGCGTCGATGCCAAGGCCATCCTGTCCGCCCGGCTGTCGAAGTCGCGGCGCCTCGAAAACCTGAT | |
| generally | CGCACAGCTGCCGGGAGAGAAAAAGAACGGACTTTTCGGCAACTTGATCGCTCTCTCACTGGGACTCACTCCCAATTTCAAGTCCA | |
| high | ATTTTGACCTGGCCGAGGACGCGAAGCTGCAACTCTCAAAGGACACCTACGACGACGACTTGGACAATTTGCTGGCACAAATTGGC | |
| expression | GATCAGTACGCGGATCTGTTCCTTGCCGCTAAGAACCTTTCGGACGCAATCTTGCTGTCCGATATCCTGCGCGTGAACACCGAAAT | |
| in humans | AACCAAAGCGCCGCTTAGCGCCTCGATGATTAAGCGGTACGACGAGCATCACCAGGATCTCACGCTGCTCAAAGCGCTCGTGAGAC | |
| | AGCAACTGCCTGAAAAGTACAAGGAGATCTTCTTCGACCAGTCCAAGAATGGGTACGCAGGGTACATCGATGGAGGCGCTAGCCAG | |
| | GAAGAGTTCTATAAGTTCATCAAGCCAATCCTGGAAAAGATGGACGGAACCGAAGAACTGCTGGTCAAGCTGAACAGGGAGGATCT | |
| | GCTCCGGAAACAGAGAACCTTTGACAACGGATCCATTCCCCACCAGATCCATCTGGGTGAGCTGCACGCCATCTTGCGGCGCCAGG | |
| | AGGACTTTTACCCATTCCTCAAGGACAACCGGGAAAAGATCGAGAAAATTCTGACGTTCCGCATCCCGTATTACGTGGGCCCACTG | |
| | GCGCGCGGCAATTCGCGCTTCGCGTGGATGACTAGAAAATCAGAGGAAACCATCACTCCTTGGAATTTCGAGGAAGTTGTGGATAA | |
| | GGGAGCTTCGGCACAAAGCTTCATCGAACGAATGACCAACTTCGACAAGAATCTCCCAAACGAGAAGGTGCTTCCTAAGCACAGCC | |
| | TCCTTTACGAATACTTCACTGTCTACAACGAACTGACTAAAGTGAAATACGTTACTGAAGGAATGAGGAAGCCGGCCTTTCTGTCC | |
| | GGAGAACAGAAGAAAGCAATTGTCGATCTGCTGTTCAAGACCAACCGCAAGGTGACCGTCAAGCAGCTTAAAGAGGACTACTTCAA | |
| | GAAGATCGAGTGTTTCGACTCAGTGGAAATCAGCGGGGTGGAGGACAGATTCAACGCTTCGCTGGGAACCTATCATGATCTCCTGA | |
| | AGATCATCAAGGACAAGGACTTCCTTGACAACGAGGAGAACGAGGACATCCTGGAAGATATCGTCCTGACCTTGACCCTTTTCGAG | |
| | GATCGCGAGATGATCGAGGAGAGGCTTAAGACCTACGCTCATCTCTTCGACGATAAGGTCATGAAACAACTCAAGCGCCGCCGGTA | |
| | CACTGGTTGGGGCCGCCTCTCCCGCAAGCTGATCAACGGTATTCGCGATAAACAGAGCGGTAAAACTATCCTGGATTTCCTCAAAT | |
| | CGGATGGCTTCGCTAATCGTAACTTCATGCAATTGATCCACGACGACAGCCTGACCTTTAAGGAGGACATCCAAAAAGCACAAGTG | |
| | TCCGGACAGGGAGACTCACTCCATGAACACATCGCGAATCTGGCCGGTTCGCCGGCGATTAAGAAGGGAATTCTGCAAACTGTGAA | |
| | GGTGGTCGACGAGCTGGTGAAGGTCATGGGACGGCACAAACCGGAGAATATCGTGATTGAAATGGCCCGAGAAAACCAGACTACCC | |
| | AGAAGGGCCAGAAAAACTCCCGCGAAAGGATGAAGCGGATCGAAGAAGGAATCAAGGAGCTGGGCAGCCAGATCCTGAAAGAGCAC | |
| | CCGGTGGAAAACACGCAGCTGCAGAACGAGAAGCTCTACCTGTACTATTTGCAAAATGGACGGGACATGTACGTGGACCAAGAGCT | |
| | GGACATCAATCGGTTGTCTGATTACGACGTGGACCACATCGTTCCACAGTCCTTTCTGAAGGATGACTCGATCGATAACAAGGTGT | |
| | TGACTCGCAGCGACAAGAACAGAGGGAAGTCAGATAATGTGCCATCGGAGGAGGTCGTGAAGAAGATGAAGAATTACTGGCGGCAG | |
| | CTCCTGAATGCGAAGCTGATTACCCAGAGAAAGTTTGACAATCTCACTAAAGCCGAGCGCGGCGGACTCTCAGAGCTGGATAAGGC | |
| | TGGATTCATCAAACGGCAGCTGGTCGAGACTCGGCAGATTACCAAGCACGTGGCGCAGATCTTGGACTCCCGCATGAACACTAAAT | |
| | ACGACGAGAACGATAAGCTCATCCGGGAAGTGAAGGTGATTACCCTGAAAAGCAAACTTGTGTCGGACTTTCGGAAGGACTTTCAG | |
| | TTTTACAAAGTGAGAGAAATCAACAACTACCATCACGCGCATGACGCATACCTCAACGCTGTGGTCGGTACCGCCCTGATCAAAAA | |
| | GTACCCTAAACTTGAATCGGAGTTTGTGTACGGAGACTACAAGGTCTACGACGTGAGGAAGATGATAGCCAAGTCCGAACAGGAAA | |
| | TCGGGAAAGCAACTGCGAAATACTTCTTTTACTCAAACATCATGAACTTTTTCAAGACTGAAATTACGCTGGCCAATGGAGAAATC | |
| | AGGAAGAGGCCACTGATCGAAACTAACGGAGAAACGGGCGAAATCGTGTGGGACAAGGGCAGGGACTTCGCAACTGTTCGCAAAGT | |
| | GCTCTCTATGCCGCAAGTCAATATTGTGAAGAAAACCGAAGTGCAAACCGGCGGATTTTCAAAGGAATCGATCCTCCCAAAGAGAA | |
| | ATAGCGACAAGCTCATTGCACGCAAGAAAGACTGGGACCCGAAGAAGTACGGAGGATTCGATTCGCCGACTGTCGCATACTCCGTC | |
| | CTCGTGGTGGCCAAGGTGGAGAAGGGAAAGAGCAAAAAGCTCAAATCCGTCAAAGAGCTGCTGGGGATTACCATCATGGAACGATC | |
| | CTCGTTCGAGAAGAACCCGATTGATTTCCTCGAGGCGAAGGGTTACAAGGAGGTGAAGAAGGATCTGATCATCAAACTCCCCAAGT | |
| | ACTCACTGTTCGAACTGGAAAATGGTCGGAAGCGCATGCTGGCTTCGGCCGGAGAACTCCAAAAAGGAAATGAGCTGGCCTTGCCT | |
| | AGCAAGTACGTCAACTTCCTCTATCTTGCTTCGCACTACGAAAAACTCAAAGGGTCACCGGAAGATAACGAACAGAAGCAGCTTTT | |
| | CGTGGAGCAGCACAAGCATTATCTGGATGAAATCATCGAACAAATCTCCGAGTTTTCAAAGCGCGTGATCCTCGCCGACGCCAACC | |
| | TCGACAAAGTCCTGTCGGCCTACAATAAGCATAGAGATAAGCCGATCAGAGAACAGGCCGAGAACATTATCCACTTGTTCACCCTG | |
| | ACTAACCTGGGAGCCCCAGCCGCCTTCAAGTACTTCGATACTACTATCGATCGCAAAAGATACACGTCCACCAAGGAAGTTCTGGA | |
| | CGCGACCCTGATCCACCAAAGCATCACTGGACTCTACGAAACTAGGATCGATCTGTCGCAGCTGGGTGGCGATTGATAGTCTAGCC | |
| | ATCACATTTAAAAGCATCTCAGCCTACCATGAGAATAAGAGAAAGAAAATGAAGATCAATAGCTTATTCATCTCTTTTTCTTTTTC | |
| | GTTGGTGTAAAGCCAACACCCTGTCTAAAAAACATAAATTTCTTTAATCATTTTGCCTCTTTTCTCTGTGCTTCAATTAATAAAAA | |
| | ATGGAAAGAACCTCGAG | |
| modified | mN*mN*mN*NNNNNNNNNNNNNNNNNGUUUUAGAmGmCmUmAmGmAmAmAmUmAmGmCAAGUUAAAAUAAGGCUAGUCCGUUAUCA | 3 |
| sgRNA | mAmCmUmUmGGmUmGmGmCmAmCmCmGmAmGmUmCmGmGmUmGmCmU*mU*mU*mU | |
| sequence | | |
| (“N” may be | | |
| any natural | | |
| or non- | | |
| natural | | |
| nucleotide) | | |
| 30/30/39 | AAAAAAAAAAAAAAAAAAAAAAAAAAAAAAGCGAAAAAAAAAAAAAAAAAAAAAAAAAAAAAACCGAAAAAAAAAAAAAAAAAAAA | 4 |
| poly-A | | |
| sequence | | |
| CR003335 | CUGCUCCUCCUCUGCCUUGC | 5 |
| gRNA | | |
| targeting | | |
| Human TTR | | |
| (Exon 1) | | |
| CR003336 | CCUCCUCUGCCUUGCUGGAC | 6 |
| gRNA | | |
| targeting | | |
| Human TTR | | |
| (Exon 1) | | |
| CR003337 | CCAGUCCAGCAAGGCAGAGG | 7 |
| gRNA | | |
| targeting | | |
| Human TTR | | |
| (Exon 1) | | |
| CR003338 | AUACCAGUCCAGCAAGGCAG | 8 |
| gRNA | | |
| targeting | | |
| Human TTR | | |
| (Exon 1) | | |
| CR003339 | ACACAAAUACCAGUCCAGCA | 9 |
| gRNA | | |
| targeting | | |
| Human TTR | | |
| (Exon 1) | | |
| CR003340 | UGGACUGGUAUUUGUGUCUG | 10 |
| gRNA | | |
| targeting | | |
| Human TTR | | |
| (Exon 1) | | |
| CR003341 | CUGGUAUUUGUGUCUGAGGC | 11 |
| gRNA | | |
| targeting | | |
| Human TTR | | |
| (Exon 1) | | |
| CR003342 | CUUCUCUACACCCAGGGCAC | 12 |
| gRNA | | |
| targeting | | |
| Human TTR | | |
| (Exon 2) | | |
| CR003343 | CAGAGGACACUUGGAUUCAC | 13 |
| gRNA | | |
| targeting | | |
| Human TTR | | |
| (Exon 2) | | |
| CR003344 | UUUGACCAUCAGAGGACACU | 14 |
| gRNA | | |
| targeting | | |
| Human TTR | | |
| (Exon 2) | | |
| CR003345 | UCUAGAACUUUGACCAUCAG | 15 |
| gRNA | | |
| targeting | | |
| Human TTR | | |
| (Exon 2) | | |
| CR003346 | AAAGUUCUAGAUGCUGUCCG | 16 |
| gRNA | | |
| targeting | | |
| Human TTR | | |
| (Exon 2) | | |
| CR003347 | CAUUGAUGGCAGGACUGCCU | 17 |
| gRNA | | |
| targeting | | |
| Human TTR | | |
| (Exon 2) | | |
| CR003348 | AGGCAGUCCUGCCAUCAAUG | 18 |
| gRNA | | |
| targeting | | |
| Human TTR | | |
| (Exon 2) | | |
| CR003349 | UGCACGGCCACAUUGAUGGC | 19 |
| gRNA | | |
| targeting | | |
| Human TTR | | |
| (Exon 2) | | |
| CR003350 | CACAUGCACGGCCACAUUGA | 20 |
| gRNA | | |
| targeting | | |
| Human TTR | | |
| (Exon 2) | | |
| CR003351 | AGCCUUUCUGAACACAUGCA | 21 |
| gRNA | | |
| targeting | | |
| Human TTR | | |
| (Exon 2) | | |
| CR003352 | GAAAGGCUGCUGAUGACACC | 22 |
| gRNA | | |
| targeting | | |
| Human TTR | | |
| (Exon 2) | | |
| CR003353 | AAAGGCUGCUGAUGACACCU | 23 |
| gRNA | | |
| targeting | | |
| Human TTR | | |
| (Exon 2) | | |
| CR003354 | ACCUGGGAGCCAUUUGCCUC | 24 |
| gRNA | | |
| targeting | | |
| Human TTR | | |
| (Exon 2) | | |
| CR003355 | CCCAGAGGCAAAUGGCUCCC | 25 |
| gRNA | | |
| targeting | | |
| Human TTR | | |
| (Exon 2) | | |
| CR003356 | GCAACUUACCCAGAGGCAAA | 26 |
| gRNA | | |
| targeting | | |
| Human TTR | | |
| (Exon 2) | | |
| CR003357 | UUCUUUGGCAACUUACCCAG | 27 |
| gRNA | | |
| targeting | | |
| Human TTR | | |
| (Exon 2) | | |
| CR003358 | AUGCAGCUCUCCAGACUCAC | 28 |
| gRNA | | |
| targeting | | |
| Human TTR | | |
| (Exon 3) | | |
| CR003359 | AGUGAGUCUGGAGAGCUGCA | 29 |
| gRNA | | |
| targeting | | |
| Human TTR | | |
| (Exon 3) | | |
| CR003360 | GUGAGUCUGGAGAGCUGCAU | 30 |
| gRNA | | |
| targeting | | |
| Human TTR | | |
| (Exon 3) | | |
| CR003361 | GCUGCAUGGGCUCACAACUG | 31 |
| gRNA | | |
| targeting | | |
| Human TTR | | |
| (Exon 3) | | |
| CR003362 | GCAUGGGCUCACAACUGAGG | 32 |
| gRNA | | |
| targeting | | |
| Human TTR | | |
| (Exon 3) | | |
| CR003363 | ACUGAGGAGGAAUUUGUAGA | 33 |
| gRNA | | |
| targeting | | |
| Human TTR | | |
| (Exon 3) | | |
| CR003364 | CUGAGGAGGAAUUUGUAGAA | 34 |
| gRNA | | |
| targeting | | |
| Human TTR | | |
| (Exon 3) | | |
| CR003365 | UGUAGAAGGGAUAUACAAAG | 35 |
| gRNA | | |
| targeting | | |
| Human TTR | | |
| (Exon 3) | | |
| CR003366 | AAAUAGACACCAAAUCUUAC | 36 |
| gRNA | | |
| targeting | | |
| Human TTR | | |
| (Exon 3) | | |
| CR003367 | AGACACCAAAUCUUACUGGA | 37 |
| gRNA | | |
| targeting | | |
| Human TTR | | |
| (Exon 3) | | |
| CR003368 | AAGUGCCUUCCAGUAAGAUU | 38 |
| gRNA | | |
| targeting | | |
| Human TTR | | |
| (Exon 3) | | |
| CR003369 | CUCUGCAUGCUCAUGGAAUG | 39 |
| gRNA | | |
| targeting | | |
| Human TTR | | |
| (Exon 3) | | |
| CR003370 | CCUCUGCAUGCUCAUGGAAU | 40 |
| gRNA | | |
| targeting | | |
| Human TTR | | |
| (Exon 3) | | |
| CR003371 | ACCUCUGCAUGCUCAUGGAA | 41 |
| gRNA | | |
| targeting | | |
| Human TTR | | |
| (Exon 3) | | |
| CR003372 | UACUCACCUCUGCAUGCUCA | 42 |
| gRNA | | |
| targeting | | |
| Human TTR | | |
| (Exon 3) | | |
| CR003373 | GUAUUCACAGCCAACGACUC | 43 |
| gRNA | | |
| targeting | | |
| Human TTR | | |
| (Exon 4) | | |
| CR003374 | GCGGCGGGGGCCGGAGUCGU | 44 |
| gRNA | | |
| targeting | | |
| Human TTR | | |
| (Exon 4) | | |
| CR003375 | AAUGGUGUAGCGGCGGGGGC | 45 |
| gRNA | | |
| targeting | | |
| Human TTR | | |
| (Exon 4) | | |
| CR003376 | CGGCAAUGGUGUAGCGGCGG | 46 |
| gRNA | | |
| targeting | | |
| Human TTR | | |
| (Exon 4) | | |
| CR003377 | GCGGCAAUGGUGUAGCGGCG | 47 |
| gRNA | | |
| targeting | | |
| Human TTR | | |
| (Exon 4) | | |
| CR003378 | GGCGGCAAUGGUGUAGCGGC | 48 |
| gRNA | | |
| targeting | | |
| Human TTR | | |
| (Exon 4) | | |
| CR003379 | GGGCGGCAAUGGUGUAGCGG | 49 |
| gRNA | | |
| targeting | | |
| Human TTR | | |
| (Exon 4) | | |
| CR003380 | GCAGGGCGGCAAUGGUGUAG | 50 |
| gRNA | | |
| targeting | | |
| Human TTR | | |
| (Exon 4) | | |
| CR003381 | GGGGCUCAGCAGGGCGGCAA | 51 |
| gRNA | | |
| targeting | | |
| Human TTR | | |
| (Exon 4) | | |
| CR003382 | GGAGUAGGGGCUCAGCAGGG | 52 |
| gRNA | | |
| targeting | | |
| Human TTR | | |
| (Exon 4) | | |
| CR003383 | AUAGGAGUAGGGGCUCAGCA | 53 |
| gRNA | | |
| targeting | | |
| Human TTR | | |
| (Exon 4) | | |
| CR003384 | AAUAGGAGUAGGGGCUCAGC | 54 |
| gRNA | | |
| targeting | | |
| Human TTR | | |
| (Exon 4) | | |
| CR003385 | CCCCUACUCCUAUUCCACCA | 55 |
| gRNA | | |
| targeting | | |
| Human TTR | | |
| (Exon 4) | | |
| CR003386 | CCGUGGUGGAAUAGGAGUAG | 56 |
| gRNA | | |
| targeting | | |
| Human TTR | | |
| (Exon 4) | | |
| CR003387 | GCCGUGGUGGAAUAGGAGUA | 57 |
| gRNA | | |
| targeting | | |
| Human TTR | | |
| (Exon 4) | | |
| CR003388 | GACGACAGCCGUGGUGGAAU | 58 |
| gRNA | | |
| targeting | | |
| Human TTR | | |
| (Exon 4) | | |
| CR003389 | AUUGGUGACGACAGCCGUGG | 59 |
| gRNA | | |
| targeting | | |
| Human TTR | | |
| (Exon 4) | | |
| CR003390 | GGGAUUGGUGACGACAGCCG | 60 |
| gRNA | | |
| targeting | | |
| Human TTR | | |
| (Exon 4) | | |
| CR003391 | GGCUGUCGUCACCAAUCCCA | 61 |
| gRNA | | |
| targeting | | |
| Human TTR | | |
| (Exon 4) | | |
| CR003392 | AGUCCCUCAUUCCUUGGGAU | 62 |
| gRNA | | |
| targeting | | |
| Human TTR | | |
| (Exon 4) | | |
| CR005298 | UCCACUCAUUCUUGGCAGGA | 63 |
| gRNA | | |
| targeting | | |
| Human TTR | | |
| (Exon 1) | | |
| CR005299 | AGCCGUGGUGGAAUAGGAGU | 64 |
| gRNA | | |
| targeting | | |
| Human TTR | | |
| (Exon 4) | | |
| CR005300 | UCACAGAAACACUCACCGUA | 65 |
| gRNA | | |
| targeting | | |
| Human TTR | | |
| (Exon 1) | | |
| CR005301 | GUCACAGAAACACUCACCGU | 66 |
| gRNA | | |
| targeting | | |
| Human TTR | | |
| (Exon 1) | | |
| CR005302 | ACGUGUCUUCUCUACACCCA | 67 |
| gRNA | | |
| targeting | | |
| Human TTR | | |
| (Exon 2) | | |
| CR005303 | UGAAUCCAAGUGUCCUCUGA | 68 |
| gRNA | | |
| targeting | | |
| Human TTR | | |
| (Exon 2) | | |
| CR005304 | GGCCGUGCAUGUGUUCAGAA | 69 |
| gRNA | | |
| targeting | | |
| Human TTR | | |
| (Exon 2) | | |
| CR005305 | UAUAGGAAAACCAGUGAGUC | 70 |
| gRNA | | |
| targeting | | |
| Human TTR | | |
| (Exon 3) | | |
| CR005306 | AAAUCUUACUGGAAGGCACU | 71 |
| gRNA | | |
| targeting | | |
| Human TTR | | |
| (Exon 3) | | |
| CR005307 | UGUCUGUCUUCUCUCAUAGG | 72 |
| gRNA | | |
| targeting | | |
| Human TTR | | |
| (Exon 4) | | |
| CR000689 | ACACAAAUACCAGUCCAGCG | 73 |
| gRNA | | |
| targeting | | |
| Cyno TTR | | |
| CR005364 | AAAGGCUGCUGAUGAGACCU | 74 |
| gRNA | | |
| targeting | | |
| Cyno TTR | | |
| CR005365 | CAUUGACAGCAGGACUGCCU | 75 |
| gRNA | | |
| targeting | | |
| Cyno TTR | | |
| CR005366 | AUACCAGUCCAGCGAGGCAG | 76 |
| gRNA | | |
| targeting | | |
| Cyno TTR | | |
| CR005367 | CCAGUCCAGCGAGGCAGAGG | 77 |
| gRNA | | |
| targeting | | |
| Cyno TTR | | |
| CR005368 | CCUCCUCUGCCUCGCUGGAC | 78 |
| gRNA | | |
| targeting | | |
| Cyno TTR | | |
| CR005369 | AAAGUUCUAGAUGCCGUCCG | 79 |
| gRNA | | |
| targeting | | |
| Cyno TTR | | |
| CR005370 | ACUUGUCUUCUCUAUACCCA | 80 |
| gRNA | | |
| targeting | | |
| Cyno TTR | | |
| CR005371 | AAGUGACUUCCAGUAAGAUU | 81 |
| gRNA | | |
| targeting | | |
| Cyno TTR | | |
| CR005372 | AAAAGGCUGCUGAUGAGACC | 82 |
| gRNA | | |
| targeting | | |
| Cyno TTR | | |
| | Not Used | 83 |
| | Not Used | 84 |
| | Not Used | 85 |
| | Not Used | 86 |
| G000480 | mA*mA*mA*GGCUGCUGAUGACACCUGUUUUAGAmGmCmUmAmGmAmAmAmUmAmGmCAAGUUAAAAUAAGGCUAGUCCGUUAUCA | 87 |
| sgRNA | mAmCmUmUmGGmUmGmGmCmAmCmCmGmAmGmUmCmGmGmUmGmCmU*mU*mU*mU | |
| modified | | |
| sequence | | |
| targeting | | |
| Human TTR | | |
| G000481 | mU*mC*mU*AGAACUUUGACCAUCAGGUUUUAGAmGmCmUmAmGmAmAmAmUmAmGmCAAGUUAAAAUAAGGCUAGUCCGUUAUCA | 88 |
| sgRNA | mAmCmUmUmGGmUmGmGmCmAmCmCmGmAmGmUmCmGmGmUmGmCmU*mU*mU*mU | |
| modified | | |
| sequence | | |
| targeting | | |
| Human TTR | | |
| G000482 | mU*mG*mU*AGAAGGGAUAUACAAAGGUUUUAGAmGmCmUmAmGmAmAmAmUmAmGmCAAGUUAAAAUAAGGCUAGUCCGUUAUCA | 89 |
| sgRNA | mAmCmUmUmGGmUmGmGmCmAmCmCmGmAmGmUmCmGmGmUmGmCmU*mU*mU*mU | |
| modified | | |
| sequence | | |
| targeting | | |
| Human TTR | | |
| G000483 | mU*mC*mC*ACUCAUUCUUGGCAGGAGUUUUAGAmGmCmUmAmGmAmAmAmUmAmGmCAAGUUAAAAUAAGGCUAGUCCGUUAUCA | 90 |
| sgRNA | mAmCmUmUmGGmUmGmGmCmAmCmCmGmAmGmUmCmGmGmUmGmCmU*mU*mU*mU | |
| modified | | |
| sequence | | |
| targeting | | |
| Human TTR | | |
| G000484 | mA*mG*mA*CACCAAAUCUUACUGGAGUUUUAGAmGmCmUmAmGmAmAmAmUmAmGmCAAGUUAAAAUAAGGCUAGUCCGUUAUCA | 91 |
| sgRNA | mAmCmUmUmGGmUmGmGmCmAmCmCmGmAmGmUmCmGmGmUmGmCmU*mU*mU*mU | |
| modified | | |
| sequence | | |
| targeting | | |
| Human TTR | | |
| G000485 | mC*mC*mU*CCUCUGCCUUGCUGGACGUUUUAGAmGmCmUmAmGmAmAmAmUmAmGmCAAGUUAAAAUAAGGCUAGUCCGUUAUCA | 92 |
| sgRNA | mAmCmUmUmGGmUmGmGmCmAmCmCmGmAmGmUmCmGmGmUmGmCmU*mU*mU*mU | |
| modified | | |
| sequence | | |
| targeting | | |
| Human TTR | | |
| G000486 | mA*mC*mA*CAAAUACCAGUCCAGCAGUUUUAGAmGmCmUmAmGmAmAmAmUmAmGmCAAGUUAAAAUAAGGCUAGUCCGUUAUCA | 93 |
| sgRNA | mAmCmUmUmGGmUmGmGmCmAmCmCmGmAmGmUmCmGmGmUmGmCmU*mU*mU*mU | |
| modified | | |
| sequence | | |
| targeting | | |
| Human TTR | | |
| G000487 | mU*mU*mC*UUUGGCAACUUACCCAGGUUUUAGAmGmCmUmAmGmAmAmAmUmAmGmCAAGUUAAAAUAAGGCUAGUCCGUUAUCA | 94 |
| sgRNA | mAmCmUmUmGGmUmGmGmCmAmCmCmGmAmGmUmCmGmGmUmGmCmU*mU*mU*mU | |
| modified | | |
| sequence | | |
| targeting | | |
| Human TTR | | |
| G000488 | mA*mA*mA*GUUCUAGAUGCUGUCCGGUUUUAGAmGmCmUmAmGmAmAmAmUmAmGmCAAGUUAAAAUAAGGCUAGUCCGUUAUCA | 95 |
| sgRNA | mAmCmUmUmGGmUmGmGmCmAmCmCmGmAmGmUmCmGmGmUmGmCmU*mU*mU*mU | |
| modified | | |
| sequence | | |
| targeting | | |
| Human TTR | | |
| G000489 | mU*mU*mU*GACCAUCAGAGGACACUGUUUUAGAmGmCmUmAmGmAmAmAmUmAmGmCAAGUUAAAAUAAGGCUAGUCCGUUAUCA | 96 |
| sgRNA | mAmCmUmUmGGmUmGmGmCmAmCmCmGmAmGmUmCmGmGmUmGmCmU*mU*mU*mU | |
| modified | | |
| sequence | | |
| targeting | | |
| Human TTR | | |
| G000490 | mA*mA*mA*UAGACACCAAAUCUUACGUUUUAGAmGmCmUmAmGmAmAmAmUmAmGmCAAGUUAAAAUAAGGCUAGUCCGUUAUCA | 97 |
| sgRNA | mAmCmUmUmGGmUmGmGmCmAmCmCmGmAmGmUmCmGmGmUmGmCmU*mU*mU*mU | |
| modified | | |
| sequence | | |
| targeting | | |
| Human TTR | | |
| G000491 | mA*mU*mA*CCAGUCCAGCAAGGCAGGUUUUAGAmGmCmUmAmGmAmAmAmUmAmGmCAAGUUAAAAUAAGGCUAGUCCGUUAUCA | 98 |
| sgRNA | mAmCmUmUmGGmUmGmGmCmAmCmCmGmAmGmUmCmGmGmUmGmCmU*mU*mU*mU | |
| modified | | |
| sequence | | |
| targeting | | |
| Human TTR | | |
| G000492 | mC*mU*mU*CUCUACACCCAGGGCACGUUUUAGAmGmCmUmAmGmAmAmAmUmAmGmCAAGUUAAAAUAAGGCUAGUCCGUUAUCA | 99 |
| sgRNA | mAmCmUmUmGGmUmGmGmCmAmCmCmGmAmGmUmCmGmGmUmGmCmU*mU*mU*mU | |
| modified | | |
| sequence | | |
| targeting | | |
| Human TTR | | |
| G000493 | mA*mA*mG*UGCCUUCCAGUAAGAUUGUUUUAGAmGmCmUmAmGmAmAmAmUmAmGmCAAGUUAAAAUAAGGCUAGUCCGUUAUCA | 100 |
| sgRNA | mAmCmUmUmGGmUmGmGmCmAmCmCmGmAmGmUmCmGmGmUmGmCmU*mU*mU*mU | |
| modified | | |
| sequence | | |
| targeting | | |
| Human TTR | | |
| G000494 | mG*mU*mG*AGUCUGGAGAGCUGCAUGUUUUAGAmGmCmUmAmGmAmAmAmUmAmGmCAAGUUAAAAUAAGGCUAGUCCGUUAUCA | 101 |
| sgRNA | mAmCmUmUmGGmUmGmGmCmAmCmCmGmAmGmUmCmGmGmUmGmCmU*mU*mU*mU | |
| modified | | |
| sequence | | |
| targeting | | |
| Human TTR | | |
| G000495 | mC*mA*mG*AGGACACUUGGAUUCACGUUUUAGAmGmCmUmAmGmAmAmAmUmAmGmCAAGUUAAAAUAAGGCUAGUCCGUUAUCA | 102 |
| sgRNA | mAmCmUmUmGGmUmGmGmCmAmCmCmGmAmGmUmCmGmGmUmGmCmU*mU*mU*mU | |
| modified | | |
| sequence | | |
| targeting | | |
| Human TTR | | |
| G000496 | mG*mG*mC*CGUGCAUGUGUUCAGAAGUUUUAGAmGmCmUmAmGmAmAmAmUmAmGmCAAGUUAAAAUAAGGCUAGUCCGUUAUCA | 103 |
| sgRNA | mAmCmUmUmGGmUmGmGmCmAmCmCmGmAmGmUmCmGmGmUmGmCmU*mU*mU*mU | |
| modified | | |
| sequence | | |
| targeting | | |
| Human TTR | | |
| G000497 | mC*mU*mG*CUCCUCCUCUGCCUUGCGUUUUAGAmGmCmUmAmGmAmAmAmUmAmGmCAAGUUAAAAUAAGGCUAGUCCGUUAUCA | 104 |
| sgRNA | mAmCmUmUmGGmUmGmGmCmAmCmCmGmAmGmUmCmGmGmUmGmCmU*mU*mU*mU | |
| modified | | |
| sequence | | |
| targeting | | |
| Human TTR | | |
| G000498 | mA*mG*mU*GAGUCUGGAGAGCUGCAGUUUUAGAmGmCmUmAmGmAmAmAmUmAmGmCAAGUUAAAAUAAGGCUAGUCCGUUAUCA | 105 |
| sgRNA | mAmCmUmUmGGmUmGmGmCmAmCmCmGmAmGmUmCmGmGmUmGmCmU*mU*mU*mU | |
| modified | | |
| sequence | | |
| targeting | | |
| Human TTR | | |
| G000499 | mU*mG*mA*AUCCAAGUGUCCUCUGAGUUUUAGAmGmCmUmAmGmAmAmAmUmAmGmCAAGUUAAAAUAAGGCUAGUCCGUUAUCA | 106 |
| sgRNA | mAmCmUmUmGGmUmGmGmCmAmCmCmGmAmGmUmCmGmGmUmGmCmU*mU*mU*mU | |
| modified | | |
| sequence | | |
| targeting | | |
| Human TTR | | |
| G000500 | mC*mC*mA*GUCCAGCAAGGCAGAGGGUUUUAGAmGmCmUmAmGmAmAmAmUmAmGmCAAGUUAAAAUAAGGCUAGUCCGUUAUCA | 107 |
| sgRNA | mAmCmUmUmGGmUmGmGmCmAmCmCmGmAmGmUmCmGmGmUmGmCmU*mU*mU*mU | |
| modified | | |
| sequence | | |
| targeting | | |
| Human TTR | | |
| G000501 | mU*mC*mA*CAGAAACACUCACCGUAGUUUUAGAmGmCmUmAmGmAmAmAmUmAmGmCAAGUUAAAAUAAGGCUAGUCCGUUAUCA | 108 |
| sgRNA | mAmCmUmUmGGmUmGmGmCmAmCmCmGmAmGmUmCmGmGmUmGmCmU*mU*mU*mU | |
| modified | | |
| sequence | | |
| targeting | | |
| Human TTR | | |
| G000567 | mG*mA*mA*AGGCUGCUGAUGACACCGUUUUAGAmGmCmUmAmGmAmAmAmUmAmGmCAAGUUAAAAUAAGGCUAGUCCGUUAUCA | 109 |
| sgRNA | mAmCmUmUmGGmUmGmGmCmAmCmCmGmAmGmUmCmGmGmUmGmCmU*mU*mU*mU | |
| modified | | |
| sequence | | |
| targeting | | |
| Human TTR | | |
| G000568 | mG*mG*mC*UGUCGUCACCAAUCCCAGUUUUAGAmGmCmUmAmGmAmAmAmUmAmGmCAAGUUAAAAUAAGGCUAGUCCGUUAUCA | 110 |
| sgRNA | mAmCmUmUmGGmUmGmGmCmAmCmCmGmAmGmUmCmGmGmUmGmCmU*mU*mU*mU | |
| modified | | |
| sequence | | |
| targeting | | |
| Human TTR | | |
| G000570 | mC*mA*mU*UGAUGGCAGGACUGCCUGUUUUAGAmGmCmUmAmGmAmAmAmUmAmGmCAAGUUAAAAUAAGGCUAGUCCGUUAUCA | 111 |
| sgRNA | mAmCmUmUmGGmUmGmGmCmAmCmCmGmAmGmUmCmGmGmUmGmCmU*mU*mU*mU | |
| modified | | |
| sequence | | |
| targeting | | |
| Human TTR | | |
| G000571 | mG*mU*mC*ACAGAAACACUCACCGUGUUUUAGAmGmCmUmAmGmAmAmAmUmAmGmCAAGUUAAAAUAAGGCUAGUCCGUUAUCA | 112 |
| sgRNA | mAmCmUmUmGGmUmGmGmCmAmCmCmGmAmGmUmCmGmGmUmGmCmU*mU*mU*mU | |
| modified | | |
| sequence | | |
| targeting | | |
| Human TTR | | |
| G000572 | mC*mC*mC*CUACUCCUAUUCCACCAGUUUUAGAmGmCmUmAmGmAmAmAmUmAmGmCAAGUUAAAAUAAGGCUAGUCCGUUAUCA | 113 |
| sgRNA | mAmCmUmUmGGmUmGmGmCmAmCmCmGmAmGmUmCmGmGmUmGmCmU*mU*mU*mU | |
| modified | | |
| sequence | | |
| targeting | | |
| Human TTR | | |
| G000502 | mA*mC*mA*CAAAUACCAGUCCAGCGGUUUUAGAmGmCmUmAmGmAmAmAmUmAmGmCAAGUUAAAAUAAGGCUAGUCCGUUAUCA | 114 |
| sgRNA | mAmCmUmUmGGmUmGmGmCmAmCmCmGmAmGmUmCmGmGmUmGmCmU*mU*mU*mU | |
| modified | | |
| sequence | | |
| targeting | | |
| Cyno TTR | | |
| G000503 | mA*mA*mA*AGGCUGCUGAUGAGACCGUUUUAGAmGmCmUmAmGmAmAmAmUmAmGmCAAGUUAAAAUAAGGCUAGUCCGUUAUCA | 115 |
| sgRNA | mAmCmUmUmGGmUmGmGmCmAmCmCmGmAmGmUmCmGmGmUmGmCmU*mU*mU*mU | |
| modified | | |
| sequence | | |
| targeting | | |
| Cyno TTR | | |
| G000504 | mA*mA*mA*GGCUGCUGAUGAGACCUGUUUUAGAmGmCmUmAmGmAmAmAmUmAmGmCAAGUUAAAAUAAGGCUAGUCCGUUAUCA | 116 |
| sgRNA | mAmCmUmUmGGmUmGmGmCmAmCmCmGmAmGmUmCmGmGmUmGmCmU*mU*mU*mU | |
| modified | | |
| sequence | | |
| targeting | | |
| Cyno TTR | | |
| G000505 | mC*mA*mU*UGACAGCAGGACUGCCUGUUUUAGAmGmCmUmAmGmAmAmAmUmAmGmCAAGUUAAAAUAAGGCUAGUCCGUUAUCA | 117 |
| sgRNA | mAmCmUmUmGGmUmGmGmCmAmCmCmGmAmGmUmCmGmGmUmGmCmU*mU*mU*mU | |
| modified | | |
| sequence | | |
| targeting | | |
| Cyno TTR | | |
| G000506 | mA*mU*mA*CCAGUCCAGCGAGGCAGGUUUUAGAmGmCmUmAmGmAmAmAmUmAmGmCAAGUUAAAAUAAGGCUAGUCCGUUAUCA | 118 |
| sgRNA | mAmCmUmUmGGmUmGmGmCmAmCmCmGmAmGmUmCmGmGmUmGmCmU*mU*mU*mU | |
| modified | | |
| sequence | | |
| targeting | | |
| Cyno TTR | | |
| G000507 | mC*mC*mA*GUCCAGCGAGGCAGAGGGUUUUAGAmGmCmUmAmGmAmAmAmUmAmGmCAAGUUAAAAUAAGGCUAGUCCGUUAUCA | 119 |
| sgRNA | mAmCmUmUmGGmUmGmGmCmAmCmCmGmAmGmUmCmGmGmUmGmCmU*mU*mU*mU | |
| modified | | |
| sequence | | |
| targeting | | |
| Cyno TTR | | |
| G000508 | mC*mC*mU*CCUCUGCCUCGCUGGACGUUUUAGAmGmCmUmAmGmAmAmAmUmAmGmCAAGUUAAAAUAAGGCUAGUCCGUUAUCA | 120 |
| sgRNA | mAmCmUmUmGGmUmGmGmCmAmCmCmGmAmGmUmCmGmGmUmGmCmU*mU*mU*mU | |
| modified | | |
| sequence | | |
| targeting | | |
| Cyno TTR | | |
| G000509 | mA*mA*mA*GUUCUAGAUGCCGUCCGGUUUUAGAmGmCmUmAmGmAmAmAmUmAmGmCAAGUUAAAAUAAGGCUAGUCCGUUAUCA | 121 |
| sgRNA | mAmCmUmUmGGmUmGmGmCmAmCmCmGmAmGmUmCmGmGmUmGmCmU*mU*mU*mU | |
| modified | | |
| sequence | | |
| targeting | | |
| Cyno TTR | | |
| G000510 | mA*mC*mU*UGUCUUCUCUAUACCCAGUUUUAGAmGmCmUmAmGmAmAmAmUmAmGmCAAGUUAAAAUAAGGCUAGUCCGUUAUCA | 122 |
| sgRNA | mAmCmUmUmGGmUmGmGmCmAmCmCmGmAmGmUmCmGmGmUmGmCmU*mU*mU*mU | |
| modified | | |
| sequence | | |
| targeting | | |
| Cyno TTR | | |
| G000511 | mA*mA*mG*UGACUUCCAGUAAGAUUGUUUUAGAmGmCmUmAmGmAmAmAmUmAmGmCAAGUUAAAAUAAGGCUAGUCCGUUAUCA | 123 |
| sgRNA | mAmCmUmUmGGmUmGmGmCmAmCmCmGmAmGmUmCmGmGmUmGmCmU*mU*mU*mU | |
| modified | | |
| sequence | | |
| targeting | | |
| Cyno TTR | | |
| G000282 | mU*mU*mA*CAGCCACGUCUACAGCAGUUUUAGAmGmCmUmAmGmAmAmAmUmAmGmCAAGUUAAAAUAAGGCUAGUCCGUUAUCA | 124 |
| sgRNA | mAmCmUmUmGGmUmGmGmCmAmCmCmGmAmGmUmCmGmGmUmGmCmU*mU*mU*mU | |
| modified | | |
| sequence | | |
| targeting | | |
| Mouse TTR | | |
| exemplary | GUUUUAGAGCUAGAAAUAGCAAGUUAAAAUAAGGCUAGUCCGUUAUCAACUUGAAAAAUGGCACCGAGUCGGUGCUUUU | 125 |
| nucleotide | | |
| sequence | | |
| following | | |
| the 3′ end | | |
| of the Guide | | |
| Sequence to | | |
| form a sgRNA | | |
| exemplary | GUUUUAGAGCUAUGCUGUUUUG | 126 |
| nucleotide | | |
| sequence | | |
| following | | |
| the 3′ end | | |
| of the Guide | | |
| Sequence to | | |
| form a crRNA | | |
| | Not used | 127 to 200 |
| Cas9 DNA | ATGGACAAGAAGTACAGCATCGGACTGGACATCGGAACAAACAGCGTCGGATGGGCAGTCATCACAGACGAATACAAGGTCCCGAG | 201 |
| coding | CAAGAAGTTCAAGGTCCTGGGAAACACAGACAGACACAGCATCAAGAAGAACCTGATCGGAGCACTGCTGTTCGACAGCGGAGAAA | |
| sequence 2 | CAGCAGAAGCAACAAGACTGAAGAGAACAGCAAGAAGAAGATACACAAGAAGAAAGAACAGAATCTGCTACCTGCAGGAAATCTTC | |
| | AGCAACGAAATGGCAAAGGTCGACGACAGCTTCTTCCACAGACTGGAAGAAAGCTTCCTGGTCGAAGAAGACAAGAAGCACGAAAG | |
| | ACACCCGATCTTCGGAAACATCGTCGACGAAGTCGCATACCACGAAAAGTACCCGACAATCTACCACCTGAGAAAGAAGCTGGTCG | |
| | ACAGCACAGACAAGGCAGACCTGAGACTGATCTACCTGGCACTGGCACACATGATCAAGTTCAGAGGACACTTCCTGATCGAAGGA | |
| | GACCTGAACCCGGACAACAGCGACGTCGACAAGCTGTTCATCCAGCTGGTCCAGACATACAACCAGCTGTTCGAAGAAAACCCGAT | |
| | CAACGCAAGCGGAGTCGACGCAAAGGCAATCCTGAGCGCAAGACTGAGCAAGAGCAGAAGACTGGAAAACCTGATCGCACAGCTGC | |
| | CGGGAGAAAAGAAGAACGGACTGTTCGGAAACCTGATCGCACTGAGCCTGGGACTGACACCGAACTTCAAGAGCAACTTCGACCTG | |
| | GCAGAAGACGCAAAGCTGCAGCTGAGCAAGGACACATACGACGACGACCTGGACAACCTGCTGGCACAGATCGGAGACCAGTACGC | |
| | AGACCTGTTCCTGGCAGCAAAGAACCTGAGCGACGCAATCCTGCTGAGCGACATCCTGAGAGTCAACACAGAAATCACAAAGGCAC | |
| | CGCTGAGCGCAAGCATGATCAAGAGATACGACGAACACCACCAGGACCTGACACTGCTGAAGGCACTGGTCAGACAGCAGCTGCCG | |
| | GAAAAGTACAAGGAAATCTTCTTCGACCAGAGCAAGAACGGATACGCAGGATACATCGACGGAGGAGCAAGCCAGGAAGAATTCTA | |
| | CAAGTTCATCAAGCCGATCCTGGAAAAGATGGACGGAACAGAAGAACTGCTGGTCAAGCTGAACAGAGAAGACCTGCTGAGAAAGC | |
| | AGAGAACATTCGACAACGGAAGCATCCCGCACCAGATCCACCTGGGAGAACTGCACGCAATCCTGAGAAGACAGGAAGACTTCTAC | |
| | CCGTTCCTGAAGGACAACAGAGAAAAGATCGAAAAGATCCTGACATTCAGAATCCCGTACTACGTCGGACCGCTGGCAAGAGGAAA | |
| | CAGCAGATTCGCATGGATGACAAGAAAGAGCGAAGAAACAATCACACCGTGGAACTTCGAAGAAGTCGTCGACAAGGGAGCAAGCG | |
| | CACAGAGCTTCATCGAAAGAATGACAAACTTCGACAAGAACCTGCCGAACGAAAAGGTCCTGCCGAAGCACAGCCTGCTGTACGAA | |
| | TACTTCACAGTCTACAACGAACTGACAAAGGTCAAGTACGTCACAGAAGGAATGAGAAAGCCGGCATTCCTGAGCGGAGAACAGAA | |
| | GAAGGCAATCGTCGACCTGCTGTTCAAGACAAACAGAAAGGTCACAGTCAAGCAGCTGAAGGAAGACTACTTCAAGAAGATCGAAT | |
| | GCTTCGACAGCGTCGAAATCAGCGGAGTCGAAGACAGATTCAACGCAAGCCTGGGAACATACCACGACCTGCTGAAGATCATCAAG | |
| | GACAAGGACTTCCTGGACAACGAAGAAAACGAAGACATCCTGGAAGACATCGTCCTGACACTGACACTGTTCGAAGACAGAGAAAT | |
| | GATCGAAGAAAGACTGAAGACATACGCACACCTGTTCGACGACAAGGTCATGAAGCAGCTGAAGAGAAGAAGATACACAGGATGGG | |
| | GAAGACTGAGCAGAAAGCTGATCAACGGAATCAGAGACAAGCAGAGCGGAAAGACAATCCTGGACTTCCTGAAGAGCGACGGATTC | |
| | GCAAACAGAAACTTCATGCAGCTGATCCACGACGACAGCCTGACATTCAAGGAAGACATCCAGAAGGCACAGGTCAGCGGACAGGG | |
| | AGACAGCCTGCACGAACACATCGCAAACCTGGCAGGAAGCCCGGCAATCAAGAAGGGAATCCTGCAGACAGTCAAGGTCGTCGACG | |
| | AACTGGTCAAGGTCATGGGAAGACACAAGCCGGAAAACATCGTCATCGAAATGGCAAGAGAAAACCAGACAACACAGAAGGGACAG | |
| | AAGAACAGCAGAGAAAGAATGAAGAGAATCG+AGAAGGAATCAAGGAACTGGGAAGCCAGATCCTGAAGGAACACCCGGTCGAAAA | |
| | CACACAGCTGCAGAACGAAAAGCTGTACCTGTACTACCTGCAGAACGGAAGAGACATGTACGTCGACCAGGAACTGGACATCAACA | |
| | GACTGAGCGACTACGACGTCGACCACATCGTCCCGCAGAGCTTCCTGAAGGACGACAGCATCGACAACAAGGTCCTGACAAGAAGC | |
| | GACAAGAACAGAGGAAAGAGCGACAACGTCCCGAGCGAAGAAGTCGTCAAGAAGATGAAGAACTACTGGAGACAGCTGCTGAACGC | |
| | AAAGCTGATCACACAGAGAAAGTTCGACAACCTGACAAAGGCAGAGAGAGGAGGACTGAGCGAACTGGACAAGGCAGGATTCATCA | |
| | AGAGACAGCTGGTCGAAACAAGACAGATCACAAAGCACGTCGCACAGATCCTGGACAGCAGAATGAACACAAAGTACGACGAAAAC | |
| | GACAAGCTGATCAGAGAAGTCAAGGTCATCACACTGAAGAGCAAGCTGGTCAGCGACTTCAGAAAGGACTTCCAGTTCTACAAGGT | |
| | CAGAGAAATCAACAACTACCACCACGCACACGACGCATACCTGAACGCAGTCGTCGGAACAGCACTGATCAAGAAGTACCCGAAGC | |
| | TGGAAAGCGAATTCGTCTACGGAGACTACAAGGTCTACGACGTCAGAAAGATGATCGCAAAGAGCGAACAGGAAATCGGAAAGGCA | |
| | ACAGCAAAGTACTTCTTCTACAGCAACATCATGAACTTCTTCAAGACAGAAATCACACTGGCAAACGGAGAAATCAGAAAGAGACC | |
| | GCTGATCGAAACAAACGGAGAAACAGGAGAAATCGTCTGGGACAAGGGAAGAGACTTCGCAACAGTCAGAAAGGTCCTGAGCATGC | |
| | CGCAGGTCAACATCGTCAAGAAGACAGAAGTCCAGACAGGAGGATTCAGCAAGGAAAGCATCCTGCCGAAGAGAAACAGCGACAAG | |
| | CTGATCGCAAGAAAGAAGGACTGGGACCCGAAGAAGTACGGAGGATTCGACAGCCCGACAGTCGCATACAGCGTCCTGGTCGTCGC | |
| | AAAGGTCGAAAAGGGAAAGAGCAAGAAGCTGAAGAGCGTCAAGGAACTGCTGGGAATCACAATCATGGAAAGAAGCAGCTTCGAAA | |
| | AGAACCCGATCGACTTCCTGGAAGCAAAGGGATACAAGGAAGTCAAGAAGGACCTGATCATCAAGCTGCCGAAGTACAGCCTGTTC | |
| | GAACTGGAAAACGGAAGAAAGAGAATGCTGGCAAGCGCAGGAGAACTGCAGAAGGGAAACGAACTGGCACTGCCGAGCAAGTACGT | |
| | CAACTTCCTGTACCTGGCAAGCCACTACGAAAAGCTGAAGGGAAGCCCGGAAGACAACGAACAGAAGCAGCTGTTCGTCGAACAGC | |
| | ACAAGCACTACCTGGACGAAATCATCGAACAGATCAGCGAATTCAGCAAGAGAGTCATCCTGGCAGACGCAAACCTGGACAAGGTC | |
| | CTGAGCGCATACAACAAGCACAGAGACAAGCCGATCAGAGAACAGGCAGAAAACATCATCCACCTGTTCACACTGACAAACCTGGG | |
| | AGCACCGGCAGCATTCAAGTACTTCGACACAACAATCGACAGAAAGAGATACACAAGCACAAAGGAAGTCCTGGACGCAACACTGA | |
| | TCCACCAGAGCATCACAGGACTGTACGAAACAAGAATCGACCTGAGCCAGCTGGGAGGAGACGGAGGAGGAAGCCCGAAGAAGAAG | |
| | AGAAAGGTCTAG | |
| Cas9 DNA coding | ATGGATAAGAAGTACTCAATCGGGCTGGATATCGGAACTAATTCCGTGGGTTGGGCAGTGATCACGGATGAATACAAAGTGCCGTC | 202 |
| sequence 1 | CAAGAAGTTCAAGGTCCTGGGGAACACCGATAGACACAGCATCAAGAAAAATCTCATCGGAGCCCTGCTGTTTGACTCCGGCGAAA | |
| | CCGCAGAAGCGACCCGGCTCAAACGTACCGCGAGGCGACGCTACACCCGGCGGAAGAATCGCATCTGCTATCTGCAAGAGATCTTT | |
| | TCGAACGAAATGGCAAAGGTCGACGACAGCTTCTTCCACCGCCTGGAAGAATCTTTCCTGGTGGAGGAGGACAAGAAGCATGAACG | |
| | GCATCCTATCTTTGGAAACATCGTCGACGAAGTGGCGTACCACGAAAAGTACCCGACCATCTACCATCTGCGGAAGAAGTTGGTTG | |
| | ACTCAACTGACAAGGCCGACCTCAGATTGATCTACTTGGCCCTCGCCCATATGATCAAATTCCGCGGACACTTCCTGATCGAAGGC | |
| | GATCTGAACCCTGATAACTCCGACGTGGATAAGCTTTTCATTCAACTGGTGCAGACCTACAACCAACTGTTCGAAGAAAACCCAAT | |
| | CAATGCTAGCGGCGTCGATGCCAAGGCCATCCTGTCCGCCCGGCTGTCGAAGTCGCGGCGCCTCGAAAACCTGATCGCACAGCTGC | |
| | CGGGAGAGAAAAAGAACGGACTTTTCGGCAACTTGATCGCTCTCTCACTGGGACTCACTCCCAATTTCAAGTCCAATTTTGACCTG | |
| | GCCGAGGACGCGAAGCTGCAACTCTCAAAGGACACCTACGACGACGACTTGGACAATTTGCTGGCACAAATTGGCGATCAGTACGC | |
| | GGATCTGTTCCTTGCCGCTAAGAACCTTTCGGACGCAATCTTGCTGTCCGATATCCTGCGCGTGAACACCGAAATAACCAAAGCGC | |
| | CGCTTAGCGCCTCGATGATTAAGCGGTACGACGAGCATCACCAGGATCTCACGCTGCTCAAAGCGCTCGTGAGACAGCAACTGCCT | |
| | GAAAAGTACAAGGAGATCTTCTTCGACCAGTCCAAGAATGGGTACGCAGGGTACATCGATGGAGGCGCTAGCCAGGAAGAGTTCTA | |
| | TAAGTTCATCAAGCCAATCCTGGAAAAGATGGACGGAACCGAAGAACTGCTGGTCAAGCTGAACAGGGAGGATCTGCTCCGGAAAC | |
| | AGAGAACCTTTGACAACGGATCCATTCCCCACCAGATCCATCTGGGTGAGCTGCACGCCATCTTGCGGCGCCAGGAGGACTTTTAC | |
| | CCATTCCTCAAGGACAACCGGGAAAAGATCGAGAAAATTCTGACGTTCCGCATCCCGTATTACGTGGGCCCACTGGCGCGCGGCAA | |
| | TTCGCGCTTCGCGTGGATGACTAGAAAATCAGAGGAAACCATCACTCCTTGGAATTTCGAGGAAGTTGTGGATAAGGGAGCTTCGG | |
| | CACAAAGCTTCATCGAACGAATGACCAACTTCGACAAGAATCTCCCAAACGAGAAGGTGCTTCCTAAGCACAGCCTCCTTTACGAA | |
| | TACTTCACTGTCTACAACGAACTGACTAAAGTGAAATACGTTACTGAAGGAATGAGGAAGCCGGCCTTTCTGTCCGGAGAACAGAA | |
| | GAAAGCAATTGTCGATCTGCTGTTCAAGACCAACCGCAAGGTGACCGTCAAGCAGCTTAAAGAGGACTACTTCAAGAAGATCGAGT | |
| | GTTTCGACTCAGTGGAAATCAGCGGGGTGGAGGACAGATTCAACGCTTCGCTGGGAACCTATCATGATCTCCTGAAGATCATCAAG | |
| | GACAAGGACTTCCTTGACAACGAGGAGAACGAGGACATCCTGGAAGATATCGTCCTGACCTTGACCCTTTTCGAGGATCGCGAGAT | |
| | GATCGAGGAGAGGCTTAAGACCTACGCTCATCTCTTCGACGATAAGGTCATGAAACAACTCAAGCGCCGCCGGTACACTGGTTGGG | |
| | GCCGCCTCTCCCGCAAGCTGATCAACGGTATTCGCGATAAACAGAGCGGTAAAACTATCCTGGATTTCCTCAAATCGGATGGCTTC | |
| | GCTAATCGTAACTTCATGCAATTGATCCACGACGACAGCCTGACCTTTAAGGAGGACATCCAAAAAGCACAAGTGTCCGGACAGGG | |
| | AGACTCACTCCATGAACACATCGCGAATCTGGCCGGTTCGCCGGCGATTAAGAAGGGAATTCTGCAAACTGTGAAGGTGGTCGACG | |
| | AGCTGGTGAAGGTCATGGGACGGCACAAACCGGAGAATATCGTGATTGAAATGGCCCGAGAAAACCAGACTACCCAGAAGGGCCAG | |
| | AAAAACTCCCGCGAAAGGATGAAGCGGATCGAAGAAGGAATCAAGGAGCTGGGCAGCCAGATCCTGAAAGAGCACCCGGTGGAAAA | |
| | CACGCAGCTGCAGAACGAGAAGCTCTACCTGTACTATTTGCAAAATGGACGGGACATGTACGTGGACCAAGAGCTGGACATCAATC | |
| | GGTTGTCTGATTACGACGTGGACCACATCGTTCCACAGTCCTTTCTGAAGGATGACTCGATCGATAACAAGGTGTTGACTCGCAGC | |
| | GACAAGAACAGAGGGAAGTCAGATAATGTGCCATCGGAGGAGGTCGTGAAGAAGATGAAGAATTACTGGCGGCAGCTCCTGAATGC | |
| | GAAGCTGATTACCCAGAGAAAGTTTGACAATCTCACTAAAGCCGAGCGCGGCGGACTCTCAGAGCTGGATAAGGCTGGATTCATCA | |
| | AACGGCAGCTGGTCGAGACTCGGCAGATTACCAAGCACGTGGCGCAGATCTTGGACTCCCGCATGAACACTAAATACGACGAGAAC | |
| | GATAAGCTCATCCGGGAAGTGAAGGTGATTACCCTGAAAAGCAAACTTGTGTCGGACTTTCGGAAGGACTTTCAGTTTTACAAAGT | |
| | GAGAGAAATCAACAACTACCATCACGCGCATGACGCATACCTCAACGCTGTGGTCGGTACCGCCCTGATCAAAAAGTACCCTAAAC | |
| | TTGAATCGGAGTTTGTGTACGGAGACTACAAGGTCTACGACGTGAGGAAGATGATAGCCAAGTCCGAACAGGAAATCGGGAAAGCA | |
| | ACTGCGAAATACTTCTTTTACTCAAACATCATGAACTTTTTCAAGACTGAAATTACGCTGGCCAATGGAGAAATCAGGAAGAGGCC | |
| | ACTGATCGAAACTAACGGAGAAACGGGCGAAATCGTGTGGGACAAGGGCAGGGACTTCGCAACTGTTCGCAAAGTGCTCTCTATGC | |
| | CGCAAGTCAATATTGTGAAGAAAACCGAAGTGCAAACCGGCGGATTTTCAAAGGAATCGATCCTCCCAAAGAGAAATAGCGACAAG | |
| | CTCATTGCACGCAAGAAAGACTGGGACCCGAAGAAGTACGGAGGATTCGATTCGCCGACTGTCGCATACTCCGTCCTCGTGGTGGC | |
| | CAAGGTGGAGAAGGGAAAGAGCAAAAAGCTCAAATCCGTCAAAGAGCTGCTGGGGATTACCATCATGGAACGATCCTCGTTCGAGA | |
| | AGAACCCGATTGATTTCCTCGAGGCGAAGGGTTACAAGGAGGTGAAGAAGGATCTGATCATCAAACTCCCCAAGTACTCACTGTTC | |
| | GAACTGGAAAATGGTCGGAAGCGCATGCTGGCTTCGGCCGGAGAACTCCAAAAAGGAAATGAGCTGGCCTTGCCTAGCAAGTACGT | |
| | CAACTTCCTCTATCTTGCTTCGCACTACGAAAAACTCAAAGGGTCACCGGAAGATAACGAACAGAAGCAGCTTTTCGTGGAGCAGC | |
| | ACAAGCATTATCTGGATGAAATCATCGAACAAATCTCCGAGTTTTCAAAGCGCGTGATCCTCGCCGACGCCAACCTCGACAAAGTC | |
| | CTGTCGGCCTACAATAAGCATAGAGATAAGCCGATCAGAGAACAGGCCGAGAACATTATCCACTTGTTCACCCTGACTAACCTGGG | |
| | AGCCCCAGCCGCCTTCAAGTACTTCGATACTACTATCGATCGCAAAAGATACACGTCCACCAAGGAAGTTCTGGACGCGACCCTGA | |
| | TCCACCAAAGCATCACTGGACTCTACGAAACTAGGATCGATCTGTCGCAGCTGGGTGGCGATGGCGGTGGATCTCCGAAAAAGAAG | |
| | AGAAAGGTGTAATGA | |
| Cas9 amino acid | MDKKYSIGLDIGTNSVGWAVITDEYKVPSKKFKVLGNTDRHSIKKNLIGALLFDSGETAEATRLKRTARRRYTRRKNRICYLQEIF | 203 |
| sequence | SNEMAKVDDSFFHRLEESFLVEEDKKHERHPIFGNIVDEVAYHEKYPTIYHLRKKLVDSTDKADLRLIYLALAHMIKFRGHFLIEG | |
| | DLNPDNSDVDKLFIQLVQTYNQLFEENPINASGVDAKAILSARLSKSRRLENLIAQLPGEKKNGLFGNLIALSLGLTPNFKSNFDL | |
| | AEDAKLQLSKDTYDDDLDNLLAQIGDQYADLFLAAKNLSDAILLSDILRVNTEITKAPLSASMIKRYDEHHQDLTLLKALVRQQLP | |
| | EKYKEIFFDQSKNGYAGYIDGGASQEEFYKFIKPILEKMDGTEELLVKLNREDLLRKQRTFDNGSIPHQIHLGELHAILRRQEDFY | |
| | PFLKDNREKIEKILTFRIPYYVGPLARGNSRFAWMTRKSEETITPWNFEEVVDKGASAQSFIERMTNFDKNLPNEKVLPKHSLLYE | |
| | YFTVYNELTKVKYVTEGMRKPAFLSGEQKKAIVDLLFKTNRKVTVKQLKEDYFKKIECFDSVEISGVEDRFNASLGTYHDLLKIIK | |
| | DKDFLDNEENEDILEDIVLTLTLFEDREMIEERLKTYAHLFDDKVMKQLKRRRYTGWGRLSRKLINGIRDKQSGKTILDFLKSDGF | |
| | ANRNFMQLIHDDSLTFKEDIQKAQVSGQGDSLHEHIANLAGSPAIKKGILQTVKVVDELVKVMGRHKPENIVIEMARENQTTQKGQ | |
| | KNSRERMKRIEEGIKELGSQILKEHPVENTQLQNEKLYLYYLQNGRDMYVDQELDINRLSDYDVDHIVPQSFLKDDSIDNKVLTRS | |
| | DKNRGKSDNVPSEEVVKKMKNYWRQLLNAKLITQRKFDNLTKAERGGLSELDKAGFIKRQLVETRQITKHVAQILDSRMNTKYDEN | |
| | DKLIREVKVITLKSKLVSDFRKDFQFYKVREINNYHHAHDAYLNAVVGTALIKKYPKLESEFVYGDYKVYDVRKMIAKSEQEIGKA | |
| | TAKYFFYSNIMNFFKTEITLANGEIRKRPLIETNGETGEIVWDKGRDFATVRKVLSMPQVNIVKKTEVQTGGFSKESILPKRNSDK | |
| | LIARKKDWDPKKYGGFDSPTVAYSVLVVAKVEKGKSKKLKSVKELLGITIMERSSFEKNPIDFLEAKGYKEVKKDLIIKLPKYSLF | |
| | ELENGRKRMLASAGELQKGNELALPSKYVNFLYLASHYEKLKGSPEDNEQKQLFVEQHKHYLDEIIEQISEFSKRVILADANLDKV | |
| | LSAYNKHRDKPIREQAENIIHLFTLTNLGAPAAFKYFDTTIDRKRYTSTKEVLDATLIHQSITGLYETRIDLSQLGGDGGGSPKKK | |
| | RKV | |
| Cas9 mRNA | AUGGACAAGAAGUACAGCAUCGGACUGGACAUCGGAACAAACAGCGUCGGAUGGGCAGUCAUCACAGACGAAUACAAGGUCCCGAG | 204 |
| open reading | CAAGAAGUUCAAGGUCCUGGGAAACACAGACAGACACAGCAUCAAGAAGAACCUGAUCGGAGCACUGCUGUUCGACAGCGGAGAAA | |
| frame (ORF) | CAGCAGAAGCAACAAGACUGAAGAGAACAGCAAGAAGAAGAUACACAAGAAGAAAGAACAGAAUCUGCUACCUGCAGGAAAUCUUC | |
| 2 | AGCAACGAAAUGGCAAAGGUCGACGACAGCUUCUUCCACAGACUGGAAGAAAGCUUCCUGGUCGAAGAAGACAAGAAGCACGAAAG | |
| | ACACCCGAUCUUCGGAAACAUCGUCGACGAAGUCGCAUACCACGAAAAGUACCCGACAAUCUACCACCUGAGAAAGAAGCUGGUCG | |
| | ACAGCACAGACAAGGCAGACCUGAGACUGAUCUACCUGGCACUGGCACACAUGAUCAAGUUCAGAGGACACUUCCUGAUCGAAGGA | |
| | GACCUGAACCCGGACAACAGCGACGUCGACAAGCUGUUCAUCCAGCUGGUCCAGACAUACAACCAGCUGUUCGAAGAAAACCCGAU | |
| | CAACGCAAGCGGAGUCGACGCAAAGGCAAUCCUGAGCGCAAGACUGAGCAAGAGCAGAAGACUGGAAAACCUGAUCGCACAGCUGC | |
| | CGGGAGAAAAGAAGAACGGACUGUUCGGAAACCUGAUCGCACUGAGCCUGGGACUGACACCGAACUUCAAGAGCAACUUCGACCUG | |
| | GCAGAAGACGCAAAGCUGCAGCUGAGCAAGGACACAUACGACGACGACCUGGACAACCUGCUGGCACAGAUCGGAGACCAGUACGC | |
| | AGACCUGUUCCUGGCAGCAAAGAACCUGAGCGACGCAAUCCUGCUGAGCGACAUCCUGAGAGUCAACACAGAAAUCACAAAGGCAC | |
| | CGCUGAGCGCAAGCAUGAUCAAGAGAUACGACGAACACCACCAGGACCUGACACUGCUGAAGGCACUGGUCAGACAGCAGCUGCCG | |
| | GAAAAGUACAAGGAAAUCUUCUUCGACCAGAGCAAGAACGGAUACGCAGGAUACAUCGACGGAGGAGCAAGCCAGGAAGAAUUCUA | |
| | CAAGUUCAUCAAGCCGAUCCUGGAAAAGAUGGACGGAACAGAAGAACUGCUGGUCAAGCUGAACAGAGAAGACCUGCUGAGAAAGC | |
| | AGAGAACAUUCGACAACGGAAGCAUCCCGCACCAGAUCCACCUGGGAGAACUGCACGCAAUCCUGAGAAGACAGGAAGACUUCUAC | |
| | CCGUUCCUGAAGGACAACAGAGAAAAGAUCGAAAAGAUCCUGACAUUCAGAAUCCCGUACUACGUCGGACCGCUGGCAAGAGGAAA | |
| | CAGCAGAUUCGCAUGGAUGACAAGAAAGAGCGAAGAAACAAUCACACCGUGGAACUUCGAAGAAGUCGUCGACAAGGGAGCAAGCG | |
| | CACAGAGCUUCAUCGAAAGAAUGACAAACUUCGACAAGAACCUGCCGAACGAAAAGGUCCUGCCGAAGCACAGCCUGCUGUACGAA | |
| | UACUUCACAGUCUACAACGAACUGACAAAGGUCAAGUACGUCACAGAAGGAAUGAGAAAGCCGGCAUUCCUGAGCGGAGAACAGAA | |
| | GAAGGCAAUCGUCGACCUGCUGUUCAAGACAAACAGAAAGGUCACAGUCAAGCAGCUGAAGGAAGACUACUUCAAGAAGAUCGAAU | |
| | GCUUCGACAGCGUCGAAAUCAGCGGAGUCGAAGACAGAUUCAACGCAAGCCUGGGAACAUACCACGACCUGCUGAAGAUCAUCAAG | |
| | GACAAGGACUUCCUGGACAACGAAGAAAACGAAGACAUCCUGGAAGACAUCGUCCUGACACUGACACUGUUCGAAGACAGAGAAAU | |
| | GAUCGAAGAAAGACUGAAGACAUACGCACACCUGUUCGACGACAAGGUCAUGAAGCAGCUGAAGAGAAGAAGAUACACAGGAUGGG | |
| | GAAGACUGAGCAGAAAGCUGAUCAACGGAAUCAGAGACAAGCAGAGCGGAAAGACAAUCCUGGACUUCCUGAAGAGCGACGGAUUC | |
| | GCAAACAGAAACUUCAUGCAGCUGAUCCACGACGACAGCCUGACAUUCAAGGAAGACAUCCAGAAGGCACAGGUCAGCGGACAGGG | |
| | AGACAGCCUGCACGAACACAUCGCAAACCUGGCAGGAAGCCCGGCAAUCAAGAAGGGAAUCCUGCAGACAGUCAAGGUCGUCGACG | |
| | AACUGGUCAAGGUCAUGGGAAGACACAAGCCGGAAAACAUCGUCAUCGAAAUGGCAAGAGAAAACCAGACAACACAGAAGGGACAG | |
| | AAGAACAGCAGAGAAAGAAUGAAGAGAAUCGAAGAAGGAAUCAAGGAACUGGGAAGCCAGAUCCUGAAGGAACACCCGGUCGAAAA | |
| | CACACAGCUGCAGAACGAAAAGCUGUACCUGUACUACCUGCAGAACGGAAGAGACAUGUACGUCGACCAGGAACUGGACAUCAACA | |
| | GACUGAGCGACUACGACGUCGACCACAUCGUCCCGCAGAGCUUCCUGAAGGACGACAGCAUCGACAACAAGGUCCUGACAAGAAGC | |
| | GACAAGAACAGAGGAAAGAGCGACAACGUCCCGAGCGAAGAAGUCGUCAAGAAGAUGAAGAACUACUGGAGACAGCUGCUGAACGC | |
| | AAAGCUGAUCACACAGAGAAAGUUCGACAACCUGACAAAGGCAGAGAGAGGAGGACUGAGCGAACUGGACAAGGCAGGAUUCAUCA | |
| | AGAGACAGCUGGUCGAAACAAGACAGAUCACAAAGCACGUCGCACAGAUCCUGGACAGCAGAAUGAACACAAAGUACGACGAAAAC | |
| | GACAAGCUGAUCAGAGAAGUCAAGGUCAUCACACUGAAGAGCAAGCUGGUCAGCGACUUCAGAAAGGACUUCCAGUUCUACAAGGU | |
| | CAGAGAAAUCAACAACUACCACCACGCACACGACGCAUACCUGAACGCAGUCGUCGGAACAGCACUGAUCAAGAAGUACCCGAAGC | |
| | UGGAAAGCGAAUUCGUCUACGGAGACUACAAGGUCUACGACGUCAGAAAGAUGAUCGCAAAGAGCGAACAGGAAAUCGGAAAGGCA | |
| | ACAGCAAAGUACUUCUUCUACAGCAACAUCAUGAACUUCUUCAAGACAGAAAUCACACUGGCAAACGGAGAAAUCAGAAAGAGACC | |
| | GCUGAUCGAAACAAACGGAGAAACAGGAGAAAUCGUCUGGGACAAGGGAAGAGACUUCGCAACAGUCAGAAAGGUCCUGAGCAUGC | |
| | CGCAGGUCAACAUCGUCAAGAAGACAGAAGUCCAGACAGGAGGAUUCAGCAAGGAAAGCAUCCUGCCGAAGAGAAACAGCGACAAG | |
| | CUGAUCGCAAGAAAGAAGGACUGGGACCCGAAGAAGUACGGAGGAUUCGACAGCCCGACAGUCGCAUACAGCGUCCUGGUCGUCGC | |
| | AAAGGUCGAAAAGGGAAAGAGCAAGAAGCUGAAGAGCGUCAAGGAACUGCUGGGAAUCACAAUCAUGGAAAGAAGCAGCUUCGAAA | |
| | AGAACCCGAUCGACUUCCUGGAAGCAAAGGGAUACAAGGAAGUCAAGAAGGACCUGAUCAUCAAGCUGCCGAAGUACAGCCUGUUC | |
| | GAACUGGAAAACGGAAGAAAGAGAAUGCUGGCAAGCGCAGGAGAACUGCAGAAGGGAAACGAACUGGCACUGCCGAGCAAGUACGU | |
| | CAACUUCCUGUACCUGGCAAGCCACUACGAAAAGCUGAAGGGAAGCCCGGAAGACAACGAACAGAAGCAGCUGUUCGUCGAACAGC | |
| | ACAAGCACUACCUGGACGAAAUCAUCGAACAGAUCAGCGAAUUCAGCAAGAGAGUCAUCCUGGCAGACGCAAACCUGGACAAGGUC | |
| | CUGAGCGCAUACAACAAGCACAGAGACAAGCCGAUCAGAGAACAGGCAGAAAACAUCAUCCACCUGUUCACACUGACAAACCUGGG | |
| | AGCACCGGCAGCAUUCAAGUACUUCGACACAACAAUCGACAGAAAGAGAUACACAAGCACAAAGGAAGUCCUGGACGCAACACUGA | |
| | UCCACCAGAGCAUCACAGGACUGUACGAAACAAGAAUCGACCUGAGCCAGCUGGGAGGAGACGGAGGAGGAAGCCCGAAGAAGAAG | |
| | AGAAAGGUCUAG | |
| Cas9 mRNA | AUGGAUAAGAAGUACUCAAUCGGGCUGGAUAUCGGAACUAAUUCCGUGGGUUGGGCAGUGAUCACGGAUGAAUACAAAGUGCCGUC | 205 |
| ORF 1 | CAAGAAGUUCAAGGUCCUGGGGAACACCGAUAGACACAGCAUCAAGAAAAAUCUCAUCGGAGCCCUGCUGUUUGACUCCGGCGAAA | |
| | CCGCAGAAGCGACCCGGCUCAAACGUACCGCGAGGCGACGCUACACCCGGCGGAAGAAUCGCAUCUGCUAUCUGCAAGAGAUCUUU | |
| | UCGAACGAAAUGGCAAAGGUCGACGACAGCUUCUUCCACCGCCUGGAAGAAUCUUUCCUGGUGGAGGAGGACAAGAAGCAUGAACG | |
| | GCAUCCUAUCUUUGGAAACAUCGUCGACGAAGUGGCGUACCACGAAAAGUACCCGACCAUCUACCAUCUGCGGAAGAAGUUGGUUG | |
| | ACUCAACUGACAAGGCCGACCUCAGAUUGAUCUACUUGGCCCUCGCCCAUAUGAUCAAAUUCCGCGGACACUUCCUGAUCGAAGGC | |
| | GAUCUGAACCCUGAUAACUCCGACGUGGAUAAGCUUUUCAUUCAACUGGUGCAGACCUACAACCAACUGUUCGAAGAAAACCCAAU | |
| | CAAUGCUAGCGGCGUCGAUGCCAAGGCCAUCCUGUCCGCCCGGCUGUCGAAGUCGCGGCGCCUCGAAAACCUGAUCGCACAGCUGC | |
| | CGGGAGAGAAAAAGAACGGACUUUUCGGCAACUUGAUCGCUCUCUCACUGGGACUCACUCCCAAUUUCAAGUCCAAUUUUGACCUG | |
| | GCCGAGGACGCGAAGCUGCAACUCUCAAAGGACACCUACGACGACGACUUGGACAAUUUGCUGGCACAAAUUGGCGAUCAGUACGC | |
| | GGAUCUGUUCCUUGCCGCUAAGAACCUUUCGGACGCAAUCUUGCUGUCCGAUAUCCUGCGCGUGAACACCGAAAUAACCAAAGCGC | |
| | CGCUUAGCGCCUCGAUGAUUAAGCGGUACGACGAGCAUCACCAGGAUCUCACGCUGCUCAAAGCGCUCGUGAGACAGCAACUGCCU | |
| | GAAAAGUACAAGGAGAUCUUCUUCGACCAGUCCAAGAAUGGGUACGCAGGGUACAUCGAUGGAGGCGCUAGCCAGGAAGAGUUCUA | |
| | UAAGUUCAUCAAGCCAAUCCUGGAAAAGAUGGACGGAACCGAAGAACUGCUGGUCAAGCUGAACAGGGAGGAUCUGCUCCGGAAAC | |
| | AGAGAACCUUUGACAACGGAUCCAUUCCCCACCAGAUCCAUCUGGGUGAGCUGCACGCCAUCUUGCGGCGCCAGGAGGACUUUUAC | |
| | CCAUUCCUCAAGGACAACCGGGAAAAGAUCGAGAAAAUUCUGACGUUCCGCAUCCCGUAUUACGUGGGCCCACUGGCGCGCGGCAA | |
| | UUCGCGCUUCGCGUGGAUGACUAGAAAAUCAGAGGAAACCAUCACUCCUUGGAAUUUCGAGGAAGUUGUGGAUAAGGGAGCUUCGG | |
| | CACAAAGCUUCAUCGAACGAAUGACCAACUUCGACAAGAAUCUCCCAAACGAGAAGGUGCUUCCUAAGCACAGCCUCCUUUACGAA | |
| | UACUUCACUGUCUACAACGAACUGACUAAAGUGAAAUACGUUACUGAAGGAAUGAGGAAGCCGGCCUUUCUGUCCGGAGAACAGAA | |
| | GAAAGCAAUUGUCGAUCUGCUGUUCAAGACCAACCGCAAGGUGACCGUCAAGCAGCUUAAAGAGGACUACUUCAAGAAGAUCGAGU | |
| | GUUUCGACUCAGUGGAAAUCAGCGGGGUGGAGGACAGAUUCAACGCUUCGCUGGGAACCUAUCAUGAUCUCCUGAAGAUCAUCAAG | |
| | GACAAGGACUUCCUUGACAACGAGGAGAACGAGGACAUCCUGGAAGAUAUCGUCCUGACCUUGACCCUUUUCGAGGAUCGCGAGAU | |
| | GAUCGAGGAGAGGCUUAAGACCUACGCUCAUCUCUUCGACGAUAAGGUCAUGAAACAACUCAAGCGCCGCCGGUACACUGGUUGGG | |
| | GCCGCCUCUCCCGCAAGCUGAUCAACGGUAUUCGCGAUAAACAGAGCGGUAAAACUAUCCUGGAUUUCCUCAAAUCGGAUGGCUUC | |
| | GCUAAUCGUAACUUCAUGCAAUUGAUCCACGACGACAGCCUGACCUUUAAGGAGGACAUCCAAAAAGCACAAGUGUCCGGACAGGG | |
| | AGACUCACUCCAUGAACACAUCGCGAAUCUGGCCGGUUCGCCGGCGAUUAAGAAGGGAAUUCUGCAAACUGUGAAGGUGGUCGACG | |
| | AGCUGGUGAAGGUCAUGGGACGGCACAAACCGGAGAAUAUCGUGAUUGAAAUGGCCCGAGAAAACCAGACUACCCAGAAGGGCCAG | |
| | AAAAACUCCCGCGAAAGGAUGAAGCGGAUCGAAGAAGGAAUCAAGGAGCUGGGCAGCCAGAUCCUGAAAGAGCACCCGGUGGAAAA | |
| | CACGCAGCUGCAGAACGAGAAGCUCUACCUGUACUAUUUGCAAAAUGGACGGGACAUGUACGUGGACCAAGAGCUGGACAUCAAUC | |
| | GGUUGUCUGAUUACGACGUGGACCACAUCGUUCCACAGUCCUUUCUGAAGGAUGACUCGAUCGAUAACAAGGUGUUGACUCGCAGC | |
| | GACAAGAACAGAGGGAAGUCAGAUAAUGUGCCAUCGGAGGAGGUCGUGAAGAAGAUGAAGAAUUACUGGCGGCAGCUCCUGAAUGC | |
| | GAAGCUGAUUACCCAGAGAAAGUUUGACAAUCUCACUAAAGCCGAGCGCGGCGGACUCUCAGAGCUGGAUAAGGCUGGAUUCAUCA | |
| | AACGGCAGCUGGUCGAGACUCGGCAGAUUACCAAGCACGUGGCGCAGAUCUUGGACUCCCGCAUGAACACUAAAUACGACGAGAAC | |
| | GAUAAGCUCAUCCGGGAAGUGAAGGUGAUUACCCUGAAAAGCAAACUUGUGUCGGACUUUCGGAAGGACUUUCAGUUUUACAAAGU | |
| | GAGAGAAAUCAACAACUACCAUCACGCGCAUGACGCAUACCUCAACGCUGUGGUCGGUACCGCCCUGAUCAAAAAGUACCCUAAAC | |
| | UUGAAUCGGAGUUUGUGUACGGAGACUACAAGGUCUACGACGUGAGGAAGAUGAUAGCCAAGUCCGAACAGGAAAUCGGGAAAGCA | |
| | ACUGCGAAAUACUUCUUUUACUCAAACAUCAUGAACUUUUUCAAGACUGAAAUUACGCUGGCCAAUGGAGAAAUCAGGAAGAGGCC | |
| | ACUGAUCGAAACUAACGGAGAAACGGGCGAAAUCGUGUGGGACAAGGGCAGGGACUUCGCAACUGUUCGCAAAGUGCUCUCUAUGC | |
| | CGCAAGUCAAUAUUGUGAAGAAAACCGAAGUGCAAACCGGCGGAUUUUCAAAGGAAUCGAUCCUCCCAAAGAGAAAUAGCGACAAG | |
| | CUCAUUGCACGCAAGAAAGACUGGGACCCGAAGAAGUACGGAGGAUUCGAUUCGCCGACUGUCGCAUACUCCGUCCUCGUGGUGGC | |
| | CAAGGUGGAGAAGGGAAAGAGCAAAAAGCUCAAAUCCGUCAAAGAGCUGCUGGGGAUUACCAUCAUGGAACGAUCCUCGUUCGAGA | |
| | AGAACCCGAUUGAUUUCCUCGAGGCGAAGGGUUACAAGGAGGUGAAGAAGGAUCUGAUCAUCAAACUCCCCAAGUACUCACUGUUC | |
| | GAACUGGAAAAUGGUCGGAAGCGCAUGCUGGCUUCGGCCGGAGAACUCCAAAAAGGAAAUGAGCUGGCCUUGCCUAGCAAGUACGU | |
| | CAACUUCCUCUAUCUUGCUUCGCACUACGAAAAACUCAAAGGGUCACCGGAAGAUAACGAACAGAAGCAGCUUUUCGUGGAGCAGC | |
| | ACAAGCAUUAUCUGGAUGAAAUCAUCGAACAAAUCUCCGAGUUUUCAAAGCGCGUGAUCCUCGCCGACGCCAACCUCGACAAAGUC | |
| | CUGUCGGCCUACAAUAAGCAUAGAGAUAAGCCGAUCAGAGAACAGGCCGAGAACAUUAUCCACUUGUUCACCCUGACUAACCUGGG | |
| | AGCCCCAGCCGCCUUCAAGUACUUCGAUACUACUAUCGAUCGCAAAAGAUACACGUCCACCAAGGAAGUUCUGGACGCGACCCUGA | |
| | UCCACCAAAGCAUCACUGGACUCUACGAAACUAGGAUCGAUCUGUCGCAGCUGGGUGGCGAUGGCGGUGGAUCUCCGAAAAAGAAG | |
| | AGAAAGGUGUAAUGA | |
| Cas9 nickase | MDKKYSIGLAIGTNSVGWAVITDEYKVPSKKFKVLGNTDRHSIKKNLIGALLFDSGETAEATRLKRTARRRYTRRKNRICYLQEIF | 206 |
| (D10A) amino | SNEMAKVDDSFFHRLEESFLVEEDKKHERHPIFGNIVDEVAYHEKYPTIYHLRKKLVDSTDKADLRLIYLALAHMIKFRGHFLIEG | |
| acid sequence | DLNPDNSDVDKLFIQLVQTYNQLFEENPINASGVDAKAILSARLSKSRRLENLIAQLPGEKKNGLFGNLIALSLGLTPNFKSNFDL | |
| | AEDAKLQLSKDTYDDDLDNLLAQIGDQYADLFLAAKNLSDAILLSDILRVNTEITKAPLSASMIKRYDEHHQDLTLLKALVRQQLP | |
| | EKYKEIFFDQSKNGYAGYIDGGASQEEFYKFIKPILEKMDGTEELLVKLNREDLLRKQRTFDNGSIPHQIHLGELHAILRRQEDFY | |
| | PFLKDNREKIEKILTFRIPYYVGPLARGNSRFAWMTRKSEETITPWNFEEVVDKGASAQSFIERMTNFDKNLPNEKVLPKHSLLYE | |
| | YFTVYNELTKVKYVTEGMRKPAFLSGEQKKAIVDLLFKTNRKVTVKQLKEDYFKKIECFDSVEISGVEDRFNASLGTYHDLLKIIK | |
| | DKDFLDNEENEDILEDIVLTLTLFEDREMIEERLKTYAHLFDDKVMKQLKRRRYTGWGRLSRKLINGIRDKQSGKTILDFLKSDGF | |
| | ANRNFMQLIHDDSLTFKEDIQKAQVSGQGDSLHEHIANLAGSPAIKKGILQTVKVVDELVKVMGRHKPENIVIEMARENQTTQKGQ | |
| | KNSRERMKRIEEGIKELGSQILKEHPVENTQLQNEKLYLYYLQNGRDMYVDQELDINRLSDYDVDHIVPQSFLKDDSIDNKVLTRS | |
| | DKNRGKSDNVPSEEVVKKMKNYWRQLLNAKLITQRKFDNLTKAERGGLSELDKAGFIKRQLVETRQITKHVAQILDSRMNTKYDEN | |
| | DKLIREVKVITLKSKLVSDFRKDFQFYKVREINNYHHAHDAYLNAVVGTALIKKYPKLESEFVYGDYKVYDVRKMIAKSEQEIGKA | |
| | TAKYFFYSNIMNFFKTEITLANGEIRKRPLIETNGETGEIVWDKGRDFATVRKVLSMPQVNIVKKTEVQTGGFSKESILPKRNSDK | |
| | LIARKKDWDPKKYGGFDSPTVAYSVLVVAKVEKGKSKKLKSVKELLGITIMERSSFEKNPIDFLEAKGYKEVKKDLIIKLPKYSLF | |
| | ELENGRKRMLASAGELQKGNELALPSKYVNFLYLASHYEKLKGSPEDNEQKQLFVEQHKHYLDEIIEQISEFSKRVILADANLDKV | |
| | LSAYNKHRDKPIREQAENIIHLFTLTNLGAPAAFKYFDTTIDRKRYTSTKEVLDATLIHQSITGLYETRIDLSQLGGDGGGSPKKK | |
| | RKV | |
| Cas9 nickase | AUGGACAAGAAGUACAGCAUCGGACUGGCAAUCGGAACAAACAGCGUCGGAUGGGCAGUCAUCACAGACGAAUACAAGGUCCCGAG | 207 |
| (D10A) mRNA ORF | CAAGAAGUUCAAGGUCCUGGGAAACACAGACAGACACAGCAUCAAGAAGAACCUGAUCGGAGCACUGCUGUUCGACAGCGGAGAAA | |
| | CAGCAGAAGCAACAAGACUGAAGAGAACAGCAAGAAGAAGAUACACAAGAAGAAAGAACAGAAUCUGCUACCUGCAGGAAAUCUUC | |
| | AGCAACGAAAUGGCAAAGGUCGACGACAGCUUCUUCCACAGACUGGAAGAAAGCUUCCUGGUCGAAGAAGACAAGAAGCACGAAAG | |
| | ACACCCGAUCUUCGGAAACAUCGUCGACGAAGUCGCAUACCACGAAAAGUACCCGACAAUCUACCACCUGAGAAAGAAGCUGGUCG | |
| | ACAGCACAGACAAGGCAGACCUGAGACUGAUCUACCUGGCACUGGCACACAUGAUCAAGUUCAGAGGACACUUCCUGAUCGAAGGA | |
| | GACCUGAACCCGGACAACAGCGACGUCGACAAGCUGUUCAUCCAGCUGGUCCAGACAUACAACCAGCUGUUCGAAGAAAACCCGAU | |
| | CAACGCAAGCGGAGUCGACGCAAAGGCAAUCCUGAGCGCAAGACUGAGCAAGAGCAGAAGACUGGAAAACCUGAUCGCACAGCUGC | |
| | CGGGAGAAAAGAAGAACGGACUGUUCGGAAACCUGAUCGCACUGAGCCUGGGACUGACACCGAACUUCAAGAGCAACUUCGACCUG | |
| | GCAGAAGACGCAAAGCUGCAGCUGAGCAAGGACACAUACGACGACGACCUGGACAACCUGCUGGCACAGAUCGGAGACCAGUACGC | |
| | AGACCUGUUCCUGGCAGCAAAGAACCUGAGCGACGCAAUCCUGCUGAGCGACAUCCUGAGAGUCAACACAGAAAUCACAAAGGCAC | |
| | CGCUGAGCGCAAGCAUGAUCAAGAGAUACGACGAACACCACCAGGACCUGACACUGCUGAAGGCACUGGUCAGACAGCAGCUGCCG | |
| | GAAAAGUACAAGGAAAUCUUCUUCGACCAGAGCAAGAACGGAUACGCAGGAUACAUCGACGGAGGAGCAAGCCAGGAAGAAUUCUA | |
| | CAAGUUCAUCAAGCCGAUCCUGGAAAAGAUGGACGGAACAGAAGAACUGCUGGUCAAGCUGAAaAGAGAAGACCUGCUGAGAAAGC | |
| | AGAGAACAUUCGACAACGGAAGCAUCCCGCACCAGAUCCACCUGGGAGAACUGCACGCAAUCCUGAGAAGACAGGAAGACUUCUAC | |
| | CCGUUCCUGAAGGACAACAGAGAAAAGAUCGAAAAGAUCCUGACAUUCAGAAUCCCGUACUACGUCGGACCGCUGGCAAGAGGAAA | |
| | CAGCAGAUUCGCAUGGAUGACAAGAAAGAGCGAAGAAACAAUCACACCGUGGAACUUCGAAGAAGUCGUCGACAAGGGAGCAAGCG | |
| | CACAGAGCUUCAUCGAAAGAAUGACAAACUUCGACAAGAACCUGCCGAACGAAAAGGUCCUGCCGAAGCACAGCCUGCUGUACGAA | |
| | UACUUCACAGUCUACAACGAACUGACAAAGGUCAAGUACGUCACAGAAGGAAUGAGAAAGCCGGCAUUCCUGAGCGGAGAACAGAA | |
| | GAAGGCAAUCGUCGACCUGCUGUUCAAGACAAACAGAAAGGUCACAGUCAAGCAGCUGAAGGAAGACUACUUCAAGAAGAUCGAAU | |
| | GCUUCGACAGCGUCGAAAUCAGCGGAGUCGAAGACAGAUUCAACGCAAGCCUGGGAACAUACCACGACCUGCUGAAGAUCAUCAAG | |
| | GACAAGGACUUCCUGGACAACGAAGAAAACGAAGACAUCCUGGAAGACAUCGUCCUGACACUGACACUGUUCGAAGACAGAGAAAU | |
| | GAUCGAAGAAAGACUGAAGACAUACGCACACCUGUUCGACGACAAGGUCAUGAAGCAGCUGAAGAGAAGAAGAUACACAGGAUGGG | |
| | GAAGACUGAGCAGAAAGCUGAUCAACGGAAUCAGAGACAAGCAGAGCGGAAAGACAAUCCUGGACUUCCUGAAGAGCGACGGAUUC | |
| | GCAAACAGAAACUUCAUGCAGCUGAUCCACGACGACAGCCUGACAUUCAAGGAAGACAUCCAGAAGGCACAGGUCAGCGGACAGGG | |
| | AGACAGCCUGCACGAACACAUCGCAAACCUGGCAGGAAGCCCGGCAAUCAAGAAGGGAAUCCUGCAGACAGUCAAGGUCGUCGACG | |
| | AACUGGUCAAGGUCAUGGGAAGACACAAGCCGGAAAACAUCGUCAUCGAAAUGGCAAGAGAAAACCAGACAACACAGAAGGGACAG | |
| | AAGAACAGCAGAGAAAGAAUGAAGAGAAUCGAAGAAGGAAUCAAGGAACUGGGAAGCCAGAUCCUGAAGGAACACCCGGUCGAAAA | |
| | CACACAGCUGCAGAACGAAAAGCUGUACCUGUACUACCUGCAGAACGGAAGAGACAUGUACGUCGACCAGGAACUGGACAUCAACA | |
| | GACUGAGCGACUACGACGUCGACCACAUCGUCCCGCAGAGCUUCCUGAAGGACGACAGCAUCGACAACAAGGUCCUGACAAGAAGC | |
| | GACAAGAACAGAGGAAAGAGCGACAACGUCCCGAGCGAAGAAGUCGUCAAGAAGAUGAAGAACUACUGGAGACAGCUGCUGAACGC | |
| | AAAGCUGAUCACACAGAGAAAGUUCGACAACCUGACAAAGGCAGAGAGAGGAGGACUGAGCGAACUGGACAAGGCAGGAUUCAUCA | |
| | AGAGACAGCUGGUCGAAACAAGACAGAUCACAAAGCACGUCGCACAGAUCCUGGACAGCAGAAUGAACACAAAGUACGACGAAAAC | |
| | GACAAGCUGAUCAGAGAAGUCAAGGUCAUCACACUGAAGAGCAAGCUGGUCAGCGACUUCAGAAAGGACUUCCAGUUCUACAAGGU | |
| | CAGAGAAAUCAACAACUACCACCACGCACACGACGCAUACCUGAACGCAGUCGUCGGAACAGCACUGAUCAAGAAGUACCCGAAGC | |
| | UGGAAAGCGAAUUCGUCUACGGAGACUACAAGGUCUACGACGUCAGAAAGAUGAUCGCAAAGAGCGAACAGGAAAUCGGAAAGGCA | |
| | ACAGCAAAGUACUUCUUCUACAGCAACAUCAUGAACUUCUUCAAGACAGAAAUCACACUGGCAAACGGAGAAAUCAGAAAGAGACC | |
| | GCUGAUCGAAACAAACGGAGAAACAGGAGAAAUCGUCUGGGACAAGGGAAGAGACUUCGCAACAGUCAGAAAGGUCCUGAGCAUGC | |
| | CGCAGGUCAACAUCGUCAAGAAGACAGAAGUCCAGACAGGAGGAUUCAGCAAGGAAAGCAUCCUGCCGAAGAGAAACAGCGACAAG | |
| | CUGAUCGCAAGAAAGAAGGACUGGGACCCGAAGAAGUACGGAGGAUUCGACAGCCCGACAGUCGCAUACAGCGUCCUGGUCGUCGC | |
| | AAAGGUCGAAAAGGGAAAGAGCAAGAAGCUGAAGAGCGUCAAGGAACUGCUGGGAAUCACAAUCAUGGAAAGAAGCAGCUUCGAAA | |
| | AGAACCCGAUCGACUUCCUGGAAGCAAAGGGAUACAAGGAAGUCAAGAAGGACCUGAUCAUCAAGCUGCCGAAGUACAGCCUGUUC | |
| | GAACUGGAAAACGGAAGAAAGAGAAUGCUGGCAAGCGCAGGAGAACUGCAGAAGGGAAACGAACUGGCACUGCCGAGCAAGUACGU | |
| | CAACUUCCUGUACCUGGCAAGCCACUACGAAAAGCUGAAGGGAAGCCCGGAAGACAACGAACAGAAGCAGCUGUUCGUCGAACAGC | |
| | ACAAGCACUACCUGGACGAAAUCAUCGAACAGAUCAGCGAAUUCAGCAAGAGAGUCAUCCUGGCAGACGCAAACCUGGACAAGGUC | |
| | CUGAGCGCAUACAACAAGCACAGAGACAAGCCGAUCAGAGAACAGGCAGAAAACAUCAUCCACCUGUUCACACUGACAAACCUGGG | |
| | AGCACCGGCAGCAUUCAAGUACUUCGACACAACAAUCGACAGAAAGAGAUACACAAGCACAAAGGAAGUCCUGGACGCAACACUGA | |
| | UCCACCAGAGCAUCACAGGACUGUACGAAACAAGAAUCGACCUGAGCCAGCUGGGAGGAGACGGAGGAGGAAGCCCGAAGAAGAAG | |
| | AGAAAGGUCUAG | |
| dCas9 (D10A | MDKKYSIGLAIGTNSVGWAVITDEYKVPSKKFKVLGNTDRHSIKKNLIGALLFDSGETAEATRLKRTARRRYTRRKNRICYLQEIF | 208 |
| H840A) amino acid | SNEMAKVDDSFFHRLEESFLVEEDKKHERHPIFGNIVDEVAYHEKYPTIYHLRKKLVDSTDKADLRLIYLALAHMIKFRGHFLIEG | |
| sequence | DLNPDNSDVDKLFIQLVQTYNQLFEENPINASGVDAKAILSARLSKSRRLENLIAQLPGEKKNGLFGNLIALSLGLTPNFKSNFDL | |
| | AEDAKLQLSKDTYDDDLDNLLAQIGDQYADLFLAAKNLSDAILLSDILRVNTEITKAPLSASMIKRYDEHHQDLTLLKALVRQQLP | |
| | EKYKEIFFDQSKNGYAGYIDGGASQEEFYKFIKPILEKMDGTEELLVKLNREDLLRKQRTFDNGSIPHQIHLGELHAILRRQEDFY | |
| | PFLKDNREKIEKILTFRIPYYVGPLARGNSRFAWMTRKSEETITPWNFEEVVDKGASAQSFIERMTNFDKNLPNEKVLPKHSLLYE | |
| | YFTVYNELTKVKYVTEGMRKPAFLSGEQKKAIVDLLFKTNRKVTVKQLKEDYFKKIECFDSVEISGVEDRFNASLGTYHDLLKIIK | |
| | DKDFLDNEENEDILEDIVLTLTLFEDREMIEERLKTYAHLFDDKVMKQLKRRRYTGWGRLSRKLINGIRDKQSGKTILDFLKSDGF | |
| | ANRNFMQLIHDDSLTFKEDIQKAQVSGQGDSLHEHIANLAGSPAIKKGILQTVKVVDELVKVMGRHKPENIVIEMARENQTTQKGQ | |
| | KNSRERMKRIEEGIKELGSQILKEHPVENTQLQNEKLYLYYLQNGRDMYVDQELDINRLSDYDVDAIVPQSFLKDDSIDNKVLTRS | |
| | DKNRGKSDNVPSEEVVKKMKNYWRQLLNAKLITQRKFDNLTKAERGGLSELDKAGFIKRQLVETRQITKHVAQILDSRMNTKYDEN | |
| | DKLIREVKVITLKSKLVSDFRKDFQFYKVREINNYHHAHDAYLNAVVGTALIKKYPKLESEFVYGDYKVYDVRKMIAKSEQEIGKA | |
| | TAKYFFYSNIMNFFKTEITLANGEIRKRPLIETNGETGEIVWDKGRDFATVRKVLSMPQVNIVKKTEVQTGGFSKESILPKRNSDK | |
| | LIARKKDWDPKKYGGFDSPTVAYSVLVVAKVEKGKSKKLKSVKELLGITIMERSSFEKNPIDFLEAKGYKEVKKDLIIKLPKYSLF | |
| | ELENGRKRMLASAGELQKGNELALPSKYVNFLYLASHYEKLKGSPEDNEQKQLFVEQHKHYLDEIIEQISEFSKRVILADANLDKV | |
| | LSAYNKHRDKPIREQAENIIHLFTLTNLGAPAAFKYFDTTIDRKRYTSTKEVLDATLIHQSITGLYETRIDLSQLGGDGGGSPKKK | |
| | RKV | |
| dCas9 (D10A | AUGGACAAGAAGUACAGCAUCGGACUGGCAAUCGGAACAAACAGCGUCGGAUGGGCAGUCAUCACAGACGAAUACAAGGUCCCGAG | 209 |
| H840A) mRNA | CAAGAAGUUCAAGGUCCUGGGAAACACAGACAGACACAGCAUCAAGAAGAACCUGAUCGGAGCACUGCUGUUCGACAGCGGAGAAA | |
| ORF | CAGCAGAAGCAACAAGACUGAAGAGAACAGCAAGAAGAAGAUACACAAGAAGAAAGAACAGAAUCUGCUACCUGCAGGAAAUCUUC | |
| | AGCAACGAAAUGGCAAAGGUCGACGACAGCUUCUUCCACAGACUGGAAGAAAGCUUCCUGGUCGAAGAAGACAAGAAGCACGAAAG | |
| | ACACCCGAUCUUCGGAAACAUCGUCGACGAAGUCGCAUACCACGAAAAGUACCCGACAAUCUACCACCUGAGAAAGAAGCUGGUCG | |
| | ACAGCACAGACAAGGCAGACCUGAGACUGAUCUACCUGGCACUGGCACACAUGAUCAAGUUCAGAGGACACUUCCUGAUCGAAGGA | |
| | GACCUGAACCCGGACAACAGCGACGUCGACAAGCUGUUCAUCCAGCUGGUCCAGACAUACAACCAGCUGUUCGAAGAAAACCCGAU | |
| | CAACGCAAGCGGAGUCGACGCAAAGGCAAUCCUGAGCGCAAGACUGAGCAAGAGCAGAAGACUGGAAAACCUGAUCGCACAGCUGC | |
| | CGGGAGAAAAGAAGAACGGACUGUUCGGAAACCUGAUCGCACUGAGCCUGGGACUGACACCGAACUUCAAGAGCAACUUCGACCUG | |
| | GCAGAAGACGCAAAGCUGCAGCUGAGCAAGGACACAUACGACGACGACCUGGACAACCUGCUGGCACAGAUCGGAGACCAGUACGC | |
| | AGACCUGUUCCUGGCAGCAAAGAACCUGAGCGACGCAAUCCUGCUGAGCGACAUCCUGAGAGUCAACACAGAAAUCACAAAGGCAC | |
| | CGCUGAGCGCAAGCAUGAUCAAGAGAUACGACGAACACCACCAGGACCUGACACUGCUGAAGGCACUGGUCAGACAGCAGCUGCCG | |
| | GAAAAGUACAAGGAAAUCUUCUUCGACCAGAGCAAGAACGGAUACGCAGGAUACAUCGACGGAGGAGCAAGCCAGGAAGAAUUCUA | |
| | CAAGUUCAUCAAGCCGAUCCUGGAAAAGAUGGACGGAACAGAAGAACUGCUGGUCAAGCUGAACAGAGAAGACCUGCUGAGAAAGC | |
| | AGAGAACAUUCGACAACGGAAGCAUCCCGCACCAGAUCCACCUGGGAGAACUGCACGCAAUCCUGAGAAGACAGGAAGACUUCUAC | |
| | CCGUUCCUGAAGGACAACAGAGAAAAGAUCGAAAAGAUCCUGACAUUCAGAAUCCCGUACUACGUCGGACCGCUGGCAAGAGGAAA | |
| | CAGCAGAUUCGCAUGGAUGACAAGAAAGAGCGAAGAAACAAUCACACCGUGGAACUUCGAAGAAGUCGUCGACAAGGGAGCAAGCG | |
| | CACAGAGCUUCAUCGAAAGAAUGACAAACUUCGACAAGAACCUGCCGAACGAAAAGGUCCUGCCGAAGCACAGCCUGCUGUACGAA | |
| | UACUUCACAGUCUACAACGAACUGACAAAGGUCAAGUACGUCACAGAAGGAAUGAGAAAGCCGGCAUUCCUGAGCGGAGAACAGAA | |
| | GAAGGCAAUCGUCGACCUGCUGUUCAAGACAAACAGAAAGGUCACAGUCAAGCAGCUGAAGGAAGACUACUUCAAGAAGAUCGAAU | |
| | GCUUCGACAGCGUCGAAAUCAGCGGAGUCGAAGACAGAUUCAACGCAAGCCUGGGAACAUACCACGACCUGCUGAAGAUCAUCAAG | |
| | GACAAGGACUUCCUGGACAACGAAGAAAACGAAGACAUCCUGGAAGACAUCGUCCUGACACUGACACUGUUCGAAGACAGAGAAAU | |
| | GAUCGAAGAAAGACUGAAGACAUACGCACACCUGUUCGACGACAAGGUCAUGAAGCAGCUGAAGAGAAGAAGAUACACAGGAUGGG | |
| | GAAGACUGAGCAGAAAGCUGAUCAACGGAAUCAGAGACAAGCAGAGCGGAAAGACAAUCCUGGACUUCCUGAAGAGCGACGGAUUC | |
| | GCAAACAGAAACUUCAUGCAGCUGAUCCACGACGACAGCCUGACAUUCAAGGAAGACAUCCAGAAGGCACAGGUCAGCGGACAGGG | |
| | AGACAGCCUGCACGAACACAUCGCAAACCUGGCAGGAAGCCCGGCAAUCAAGAAGGGAAUCCUGCAGACAGUCAAGGUCGUCGACG | |
| | AACUGGUCAAGGUCAUGGGAAGACACAAGCCGGAAAACAUCGUCAUCGAAAUGGCAAGAGAAAACCAGACAACACAGAAGGGACAG | |
| | AAGAACAGCAGAGAAAGAAUGAAGAGAAUCGAAGAAGGAAUCAAGGAACUGGGAAGCCAGAUCCUGAAGGAACACCCGGUCGAAAA | |
| | CACACAGCUGCAGAACGAAAAGCUGUACCUGUACUACCUGCAGAACGGAAGAGACAUGUACGUCGACCAGGAACUGGACAUCAACA | |
| | GACUGAGCGACUACGACGUCGACGCAAUCGUCCCGCAGAGCUUCCUGAAGGACGACAGCAUCGACAACAAGGUCCUGACAAGAAGC | |
| | GACAAGAACAGAGGAAAGAGCGACAACGUCCCGAGCGAAGAAGUCGUCAAGAAGAUGAAGAACUACUGGAGACAGCUGCUGAACGC | |
| | AAAGCUGAUCACACAGAGAAAGUUCGACAACCUGACAAAGGCAGAGAGAGGAGGACUGAGCGAACUGGACAAGGCAGGAUUCAUCA | |
| | AGAGACAGCUGGUCGAAACAAGACAGAUCACAAAGCACGUCGCACAGAUCCUGGACAGCAGAAUGAACACAAAGUACGACGAAAAC | |
| | GACAAGCUGAUCAGAGAAGUCAAGGUCAUCACACUGAAGAGCAAGCUGGUCAGCGACUUCAGAAAGGACUUCCAGUUCUACAAGGU | |
| | CAGAGAAAUCAACAACUACCACCACGCACACGACGCAUACCUGAACGCAGUCGUCGGAACAGCACUGAUCAAGAAGUACCCGAAGC | |
| | UGGAAAGCGAAUUCGUCUACGGAGACUACAAGGUCUACGACGUCAGAAAGAUGAUCGCAAAGAGCGAACAGGAAAUCGGAAAGGCA | |
| | ACAGCAAAGUACUUCUUCUACAGCAACAUCAUGAACUUCUUCAAGACAGAAAUCACACUGGCAAACGGAGAAAUCAGAAAGAGACC | |
| | GCUGAUCGAAACAAACGGAGAAACAGGAGAAAUCGUCUGGGACAAGGGAAGAGACUUCGCAACAGUCAGAAAGGUCCUGAGCAUGC | |
| | CGCAGGUCAACAUCGUCAAGAAGACAGAAGUCCAGACAGGAGGAUUCAGCAAGGAAAGCAUCCUGCCGAAGAGAAACAGCGACAAG | |
| | CUGAUCGCAAGAAAGAAGGACUGGGACCCGAAGAAGUACGGAGGAUUCGACAGCCCGACAGUCGCAUACAGCGUCCUGGUCGUCGC | |
| | AAAGGUCGAAAAGGGAAAGAGCAAGAAGCUGAAGAGCGUCAAGGAACUGCUGGGAAUCACAAUCAUGGAAAGAAGCAGCUUCGAAA | |
| | AGAACCCGAUCGACUUCCUGGAAGCAAAGGGAUACAAGGAAGUCAAGAAGGACCUGAUCAUCAAGCUGCCGAAGUACAGCCUGUUC | |
| | GAACUGGAAAACGGAAGAAAGAGAAUGCUGGCAAGCGCAGGAGAACUGCAGAAGGGAAACGAACUGGCACUGCCGAGCAAGUACGU | |
| | CAACUUCCUGUACCUGGCAAGCCACUACGAAAAGCUGAAGGGAAGCCCGGAAGACAACGAACAGAAGCAGCUGUUCGUCGAACAGC | |
| | ACAAGCACUACCUGGACGAAAUCAUCGAACAGAUCAGCGAAUUCAGCAAGAGAGUCAUCCUGGCAGACGCAAACCUGGACAAGGUC | |
| | CUGAGCGCAUACAACAAGCACAGAGACAAGCCGAUCAGAGAACAGGCAGAAAACAUCAUCCACCUGUUCACACUGACAAACCUGGG | |
| | AGCACCGGCAGCAUUCAAGUACUUCGACACAACAAUCGACAGAAAGAGAUACACAAGCACAAAGGAAGUCCUGGACGCAACACUGA | |
| | UCCACCAGAGCAUCACAGGACUGUACGAAACAAGAAUCGACCUGAGCCAGCUGGGAGGAGACGGAGGAGGAAGCCCGAAGAAGAAG | |
| | AGAAAGGUCUAG | |
| Cas9 bare | GACAAGAAGUACAGCAUCGGACUGGACAUCGGAACAAACAGCGUCGGAUGGGCAGUCAUCACAGACGAAUACAAGGUCCCGAGCAA | 210 |
| coding | GAAGUUCAAGGUCCUGGGAAACACAGACAGACACAGCAUCAAGAAGAACCUGAUCGGAGCACUGCUGUUCGACAGCGGAGAAACAG | |
| sequence | CAGAAGCAACAAGACUGAAGAGAACAGCAAGAAGAAGAUACACAAGAAGAAAGAACAGAAUCUGCUACCUGCAGGAAAUCUUCAGC | |
| | AACGAAAUGGCAAAGGUCGACGACAGCUUCUUCCACAGACUGGAAGAAAGCUUCCUGGUCGAAGAAGACAAGAAGCACGAAAGACA | |
| | CCCGAUCUUCGGAAACAUCGUCGACGAAGUCGCAUACCACGAAAAGUACCCGACAAUCUACCACCUGAGAAAGAAGCUGGUCGACA | |
| | GCACAGACAAGGCAGACCUGAGACUGAUCUACCUGGCACUGGCACACAUGAUCAAGUUCAGAGGACACUUCCUGAUCGAAGGAGAC | |
| | CUGAACCCGGACAACAGCGACGUCGACAAGCUGUUCAUCCAGCUGGUCCAGACAUACAACCAGCUGUUCGAAGAAAACCCGAUCAA | |
| | CGCAAGCGGAGUCGACGCAAAGGCAAUCCUGAGCGCAAGACUGAGCAAGAGCAGAAGACUGGAAAACCUGAUCGCACAGCUGCCGG | |
| | GAGAAAAGAAGAACGGACUGUUCGGAAACCUGAUCGCACUGAGCCUGGGACUGACACCGAACUUCAAGAGCAACUUCGACCUGGCA | |
| | GAAGACGCAAAGCUGCAGCUGAGCAAGGACACAUACGACGACGACCUGGACAACCUGCUGGCACAGAUCGGAGACCAGUACGCAGA | |
| | CCUGUUCCUGGCAGCAAAGAACCUGAGCGACGCAAUCCUGCUGAGCGACAUCCUGAGAGUCAACACAGAAAUCACAAAGGCACCGC | |
| | UGAGCGCAAGCAUGAUCAAGAGAUACGACGAACACCACCAGGACCUGACACUGCUGAAGGCACUGGUCAGACAGCAGCUGCCGGAA | |
| | AAGUACAAGGAAAUCUUCUUCGACCAGAGCAAGAACGGAUACGCAGGAUACAUCGACGGAGGAGCAAGCCAGGAAGAAUUCUACAA | |
| | GUUCAUCAAGCCGAUCCUGGAAAAGAUGGACGGAACAGAAGAACUGCUGGUCAAGCUGAACAGAGAAGACCUGCUGAGAAAGCAGA | |
| | GAACAUUCGACAACGGAAGCAUCCCGCACCAGAUCCACCUGGGAGAACUGCACGCAAUCCUGAGAAGACAGGAAGACUUCUACCCG | |
| | UUCCUGAAGGACAACAGAGAAAAGAUCGAAAAGAUCCUGACAUUCAGAAUCCCGUACUACGUCGGACCGCUGGCAAGAGGAAACAG | |
| | CAGAUUCGCAUGGAUGACAAGAAAGAGCGAAGAAACAAUCACACCGUGGAACUUCGAAGAAGUCGUCGACAAGGGAGCAAGCGCAC | |
| | AGAGCUUCAUCGAAAGAAUGACAAACUUCGACAAGAACCUGCCGAACGAAAAGGUCCUGCCGAAGCACAGCCUGCUGUACGAAUAC | |
| | UUCACAGUCUACAACGAACUGACAAAGGUCAAGUACGUCACAGAAGGAAUGAGAAAGCCGGCAUUCCUGAGCGGAGAACAGAAGAA | |
| | GGCAAUCGUCGACCUGCUGUUCAAGACAAACAGAAAGGUCACAGUCAAGCAGCUGAAGGAAGACUACUUCAAGAAGAUCGAAUGCU | |
| | UCGACAGCGUCGAAAUCAGCGGAGUCGAAGACAGAUUCAACGCAAGCCUGGGAACAUACCACGACCUGCUGAAGAUCAUCAAGGAC | |
| | AAGGACUUCCUGGACAACGAAGAAAACGAAGACAUCCUGGAAGACAUCGUCCUGACACUGACACUGUUCGAAGACAGAGAAAUGAU | |
| | CGAAGAAAGACUGAAGACAUACGCACACCUGUUCGACGACAAGGUCAUGAAGCAGCUGAAGAGAAGAAGAUACACAGGAUGGGGAA | |
| | GACUGAGCAGAAAGCUGAUCAACGGAAUCAGAGACAAGCAGAGCGGAAAGACAAUCCUGGACUUCCUGAAGAGCGACGGAUUCGCA | |
| | AACAGAAACUUCAUGCAGCUGAUCCACGACGACAGCCUGACAUUCAAGGAAGACAUCCAGAAGGCACAGGUCAGCGGACAGGGAGA | |
| | CAGCCUGCACGAACACAUCGCAAACCUGGCAGGAAGCCCGGCAAUCAAGAAGGGAAUCCUGCAGACAGUCAAGGUCGUCGACGAAC | |
| | UGGUCAAGGUCAUGGGAAGACACAAGCCGGAAAACAUCGUCAUCGAAAUGGCAAGAGAAAACCAGACAACACAGAAGGGACAGAAG | |
| | AACAGCAGAGAAAGAAUGAAGAGAAUCGAAGAAGGAAUCAAGGAACUGGGAAGCCAGAUCCUGAAGGAACACCCGGUCGAAAACAC | |
| | ACAGCUGCAGAACGAAAAGCUGUACCUGUACUACCUGCAGAACGGAAGAGACAUGUACGUCGACCAGGAACUGGACAUCAACAGAC | |
| | UGAGCGACUACGACGUCGACCACAUCGUCCCGCAGAGCUUCCUGAAGGACGACAGCAUCGACAACAAGGUCCUGACAAGAAGCGAC | |
| | AAGAACAGAGGAAAGAGCGACAACGUCCCGAGCGAAGAAGUCGUCAAGAAGAUGAAGAACUACUGGAGACAGCUGCUGAACGCAAA | |
| | GCUGAUCACACAGAGAAAGUUCGACAACCUGACAAAGGCAGAGAGAGGAGGACUGAGCGAACUGGACAAGGCAGGAUUCAUCAAGA | |
| | GACAGCUGGUCGAAACAAGACAGAUCACAAAGCACGUCGCACAGAUCCUGGACAGCAGAAUGAACACAAAGUACGACGAAAACGAC | |
| | AAGCUGAUCAGAGAAGUCAAGGUCAUCACACUGAAGAGCAAGCUGGUCAGCGACUUCAGAAAGGACUUCCAGUUCUACAAGGUCAG | |
| | AGAAAUCAACAACUACCACCACGCACACGACGCAUACCUGAACGCAGUCGUCGGAACAGCACUGAUCAAGAAGUACCCGAAGCUGG | |
| | AAAGCGAAUUCGUCUACGGAGACUACAAGGUCUACGACGUCAGAAAGAUGAUCGCAAAGAGCGAACAGGAAAUCGGAAAGGCAACA | |
| | GCAAAGUACUUCUUCUACAGCAACAUCAUGAACUUCUUCAAGACAGAAAUCACACUGGCAAACGGAGAAAUCAGAAAGAGACCGCU | |
| | GAUCGAAACAAACGGAGAAACAGGAGAAAUCGUCUGGGACAAGGGAAGAGACUUCGCAACAGUCAGAAAGGUCCUGAGCAUGCCGC | |
| | AGGUCAACAUCGUCAAGAAGACAGAAGUCCAGACAGGAGGAUUCAGCAAGGAAAGCAUCCUGCCGAAGAGAAACAGCGACAAGCUG | |
| | AUCGCAAGAAAGAAGGACUGGGACCCGAAGAAGUACGGAGGAUUCGACAGCCCGACAGUCGCAUACAGCGUCCUGGUCGUCGCAAA | |
| | GGUCGAAAAGGGAAAGAGCAAGAAGCUGAAGAGCGUCAAGGAACUGCUGGGAAUCACAAUCAUGGAAAGAAGCAGCUUCGAAAAGA | |
| | ACCCGAUCGACUUCCUGGAAGCAAAGGGAUACAAGGAAGUCAAGAAGGACCUGAUCAUCAAGCUGCCGAAGUACAGCCUGUUCGAA | |
| | CUGGAAAACGGAAGAAAGAGAAUGCUGGCAAGCGCAGGAGAACUGCAGAAGGGAAACGAACUGGCACUGCCGAGCAAGUACGUCAA | |
| | CUUCCUGUACCUGGCAAGCCACUACGAAAAGCUGAAGGGAAGCCCGGAAGACAACGAACAGAAGCAGCUGUUCGUCGAACAGCACA | |
| | AGCACUACCUGGACGAAAUCAUCGAACAGAUCAGCGAAUUCAGCAAGAGAGUCAUCCUGGCAGACGCAAACCUGGACAAGGUCCUG | |
| | AGCGCAUACAACAAGCACAGAGACAAGCCGAUCAGAGAACAGGCAGAAAACAUCAUCCACCUGUUCACACUGACAAACCUGGGAGC | |
| | ACCGGCAGCAUUCAAGUACUUCGACACAACAAUCGACAGAAAGAGAUACACAAGCACAAAGGAAGUCCUGGACGCAACACUGAUCC | |
| | ACCAGAGCAUCACAGGACUGUACGAAACAAGAAUCGACCUGAGCCAGCUGGGAGGAGACGGAGGAGGAAGCCCGAAGAAGAAGAGA | |
| | AAGGUC | |
| Cas9 nickase | GACAAGAAGUACAGCAUCGGACUGGCAAUCGGAACAAACAGCGUCGGAUGGGCAGUCAUCACAGACGAAUACAAGGUCCCGAGCAA | 211 |
| bare coding | GAAGUUCAAGGUCCUGGGAAACACAGACAGACACAGCAUCAAGAAGAACCUGAUCGGAGCACUGCUGUUCGACAGCGGAGAAACAG | |
| sequence | CAGAAGCAACAAGACUGAAGAGAACAGCAAGAAGAAGAUACACAAGAAGAAAGAACAGAAUCUGCUACCUGCAGGAAAUCUUCAGC | |
| | AACGAAAUGGCAAAGGUCGACGACAGCUUCUUCCACAGACUGGAAGAAAGCUUCCUGGUCGAAGAAGACAAGAAGCACGAAAGACA | |
| | CCCGAUCUUCGGAAACAUCGUCGACGAAGUCGCAUACCACGAAAAGUACCCGACAAUCUACCACCUGAGAAAGAAGCUGGUCGACA | |
| | GCACAGACAAGGCAGACCUGAGACUGAUCUACCUGGCACUGGCACACAUGAUCAAGUUCAGAGGACACUUCCUGAUCGAAGGAGAC | |
| | CUGAACCCGGACAACAGCGACGUCGACAAGCUGUUCAUCCAGCUGGUCCAGACAUACAACCAGCUGUUCGAAGAAAACCCGAUCAA | |
| | CGCAAGCGGAGUCGACGCAAAGGCAAUCCUGAGCGCAAGACUGAGCAAGAGCAGAAGACUGGAAAACCUGAUCGCACAGCUGCCGG | |
| | GAGAAAAGAAGAACGGACUGUUCGGAAACCUGAUCGCACUGAGCCUGGGACUGACACCGAACUUCAAGAGCAACUUCGACCUGGCA | |
| | GAAGACGCAAAGCUGCAGCUGAGCAAGGACACAUACGACGACGACCUGGACAACCUGCUGGCACAGAUCGGAGACCAGUACGCAGA | |
| | CCUGUUCCUGGCAGCAAAGAACCUGAGCGACGCAAUCCUGCUGAGCGACAUCCUGAGAGUCAACACAGAAAUCACAAAGGCACCGC | |
| | UGAGCGCAAGCAUGAUCAAGAGAUACGACGAACACCACCAGGACCUGACACUGCUGAAGGCACUGGUCAGACAGCAGCUGCCGGAA | |
| | AAGUACAAGGAAAUCUUCUUCGACCAGAGCAAGAACGGAUACGCAGGAUACAUCGACGGAGGAGCAAGCCAGGAAGAAUUCUACAA | |
| | GUUCAUCAAGCCGAUCCUGGAAAAGAUGGACGGAACAGAAGAACUGCUGGUCAAGCUGAACAGAGAAGACCUGCUGAGAAAGCAGA | |
| | GAACAUUCGACAACGGAAGCAUCCCGCACCAGAUCCACCUGGGAGAACUGCACGCAAUCCUGAGAAGACAGGAAGACUUCUACCCG | |
| | UUCCUGAAGGACAACAGAGAAAAGAUCGAAAAGAUCCUGACAUUCAGAAUCCCGUACUACGUCGGACCGCUGGCAAGAGGAAACAG | |
| | CAGAUUCGCAUGGAUGACAAGAAAGAGCGAAGAAACAAUCACACCGUGGAACUUCGAAGAAGUCGUCGACAAGGGAGCAAGCGCAC | |
| | AGAGCUUCAUCGAAAGAAUGACAAACUUCGACAAGAACCUGCCGAACGAAAAGGUCCUGCCGAAGCACAGCCUGCUGUACGAAUAC | |
| | UUCACAGUCUACAACGAACUGACAAAGGUCAAGUACGUCACAGAAGGAAUGAGAAAGCCGGCAUUCCUGAGCGGAGAACAGAAGAA | |
| | GGCAAUCGUCGACCUGCUGUUCAAGACAAACAGAAAGGUCACAGUCAAGCAGCUGAAGGAAGACUACUUCAAGAAGAUCGAAUGCU | |
| | UCGACAGCGUCGAAAUCAGCGGAGUCGAAGACAGAUUCAACGCAAGCCUGGGAACAUACCACGACCUGCUGAAGAUCAUCAAGGAC | |
| | AAGGACUUCCUGGACAACGAAGAAAACGAAGACAUCCUGGAAGACAUCGUCCUGACACUGACACUGUUCGAAGACAGAGAAAUGAU | |
| | CGAAGAAAGACUGAAGACAUACGCACACCUGUUCGACGACAAGGUCAUGAAGCAGCUGAAGAGAAGAAGAUACACAGGAUGGGGAA | |
| | GACUGAGCAGAAAGCUGAUCAACGGAAUCAGAGACAAGCAGAGCGGAAAGACAAUCCUGGACUUCCUGAAGAGCGACGGAUUCGCA | |
| | AACAGAAACUUCAUGCAGCUGAUCCACGACGACAGCCUGACAUUCAAGGAAGACAUCCAGAAGGCACAGGUCAGCGGACAGGGAGA | |
| | CAGCCUGCACGAACACAUCGCAAACCUGGCAGGAAGCCCGGCAAUCAAGAAGGGAAUCCUGCAGACAGUCAAGGUCGUCGACGAAC | |
| | UGGUCAAGGUCAUGGGAAGACACAAGCCGGAAAACAUCGUCAUCGAAAUGGCAAGAGAAAACCAGACAACACAGAAGGGACAGAAG | |
| | AACAGCAGAGAAAGAAUGAAGAGAAUCGAAGAAGGAAUCAAGGAACUGGGAAGCCAGAUCCUGAAGGAACACCCGGUCGAAAACAC | |
| | ACAGCUGCAGAACGAAAAGCUGUACCUGUACUACCUGCAGAACGGAAGAGACAUGUACGUCGACCAGGAACUGGACAUCAACAGAC | |
| | UGAGCGACUACGACGUCGACCACAUCGUCCCGCAGAGCUUCCUGAAGGACGACAGCAUCGACAACAAGGUCCUGACAAGAAGCGAC | |
| | AAGAACAGAGGAAAGAGCGACAACGUCCCGAGCGAAGAAGUCGUCAAGAAGAUGAAGAACUACUGGAGACAGCUGCUGAACGCAAA | |
| | GCUGAUCACACAGAGAAAGUUCGACAACCUGACAAAGGCAGAGAGAGGAGGACUGAGCGAACUGGACAAGGCAGGAUUCAUCAAGA | |
| | GACAGCUGGUCGAAACAAGACAGAUCACAAAGCACGUCGCACAGAUCCUGGACAGCAGAAUGAACACAAAGUACGACGAAAACGAC | |
| | AAGCUGAUCAGAGAAGUCAAGGUCAUCACACUGAAGAGCAAGCUGGUCAGCGACUUCAGAAAGGACUUCCAGUUCUACAAGGUCAG | |
| | AGAAAUCAACAACUACCACCACGCACACGACGCAUACCUGAACGCAGUCGUCGGAACAGCACUGAUCAAGAAGUACCCGAAGCUGG | |
| | AAAGCGAAUUCGUCUACGGAGACUACAAGGUCUACGACGUCAGAAAGAUGAUCGCAAAGAGCGAACAGGAAAUCGGAAAGGCAACA | |
| | GCAAAGUACUUCUUCUACAGCAACAUCAUGAACUUCUUCAAGACAGAAAUCACACUGGCAAACGGAGAAAUCAGAAAGAGACCGCU | |
| | GAUCGAAACAAACGGAGAAACAGGAGAAAUCGUCUGGGACAAGGGAAGAGACUUCGCAACAGUCAGAAAGGUCCUGAGCAUGCCGC | |
| | AGGUCAACAUCGUCAAGAAGACAGAAGUCCAGACAGGAGGAUUCAGCAAGGAAAGCAUCCUGCCGAAGAGAAACAGCGACAAGCUG | |
| | AUCGCAAGAAAGAAGGACUGGGACCCGAAGAAGUACGGAGGAUUCGACAGCCCGACAGUCGCAUACAGCGUCCUGGUCGUCGCAAA | |
| | GGUCGAAAAGGGAAAGAGCAAGAAGCUGAAGAGCGUCAAGGAACUGCUGGGAAUCACAAUCAUGGAAAGAAGCAGCUUCGAAAAGA | |
| | ACCCGAUCGACUUCCUGGAAGCAAAGGGAUACAAGGAAGUCAAGAAGGACCUGAUCAUCAAGCUGCCGAAGUACAGCCUGUUCGAA | |
| | CUGGAAAACGGAAGAAAGAGAAUGCUGGCAAGCGCAGGAGAACUGCAGAAGGGAAACGAACUGGCACUGCCGAGCAAGUACGUCAA | |
| | CUUCCUGUACCUGGCAAGCCACUACGAAAAGCUGAAGGGAAGCCCGGAAGACAACGAACAGAAGCAGCUGUUCGUCGAACAGCACA | |
| | AGCACUACCUGGACGAAAUCAUCGAACAGAUCAGCGAAUUCAGCAAGAGAGUCAUCCUGGCAGACGCAAACCUGGACAAGGUCCUG | |
| | AGCGCAUACAACAAGCACAGAGACAAGCCGAUCAGAGAACAGGCAGAAAACAUCAUCCACCUGUUCACACUGACAAACCUGGGAGC | |
| | ACCGGCAGCAUUCAAGUACUUCGACACAACAAUCGACAGAAAGAGAUACACAAGCACAAAGGAAGUCCUGGACGCAACACUGAUCC | |
| | ACCAGAGCAUCACAGGACUGUACGAAACAAGAAUCGACCUGAGCCAGCUGGGAGGAGACGGAGGAGGAAGCCCGAAGAAGAAGAGA | |
| | AAGGUC | |
| dCas9 bare | GACAAGAAGUACAGCAUCGGACUGGCAAUCGGAACAAACAGCGUCGGAUGGGCAGUCAUCACAGACGAAUACAAGGUCCCGAGCAA | 212 |
| coding | GAAGUUCAAGGUCCUGGGAAACACAGACAGACACAGCAUCAAGAAGAACCUGAUCGGAGCACUGCUGUUCGACAGCGGAGAAACAG | |
| sequence | CAGAAGCAACAAGACUGAAGAGAACAGCAAGAAGAAGAUACACAAGAAGAAAGAACAGAAUCUGCUACCUGCAGGAAAUCUUCAGC | |
| | AACGAAAUGGCAAAGGUCGACGACAGCUUCUUCCACAGACUGGAAGAAAGCUUCCUGGUCGAAGAAGACAAGAAGCACGAAAGACA | |
| | CCCGAUCUUCGGAAACAUCGUCGACGAAGUCGCAUACCACGAAAAGUACCCGACAAUCUACCACCUGAGAAAGAAGCUGGUCGACA | |
| | GCACAGACAAGGCAGACCUGAGACUGAUCUACCUGGCACUGGCACACAUGAUCAAGUUCAGAGGACACUUCCUGAUCGAAGGAGAC | |
| | CUGAACCCGGACAACAGCGACGUCGACAAGCUGUUCAUCCAGCUGGUCCAGACAUACAACCAGCUGUUCGAAGAAAACCCGAUCAA | |
| | CGCAAGCGGAGUCGACGCAAAGGCAAUCCUGAGCGCAAGACUGAGCAAGAGCAGAAGACUGGAAAACCUGAUCGCACAGCUGCCGG | |
| | GAGAAAAGAAGAACGGACUGUUCGGAAACCUGAUCGCACUGAGCCUGGGACUGACACCGAACUUCAAGAGCAACUUCGACCUGGCA | |
| | GAAGACGCAAAGCUGCAGCUGAGCAAGGACACAUACGACGACGACCUGGACAACCUGCUGGCACAGAUCGGAGACCAGUACGCAGA | |
| | CCUGUUCCUGGCAGCAAAGAACCUGAGCGACGCAAUCCUGCUGAGCGACAUCCUGAGAGUCAACACAGAAAUCACAAAGGCACCGC | |
| | UGAGCGCAAGCAUGAUCAAGAGAUACGACGAACACCACCAGGACCUGACACUGCUGAAGGCACUGGUCAGACAGCAGCUGCCGGAA | |
| | AAGUACAAGGAAAUCUUCUUCGACCAGAGCAAGAACGGAUACGCAGGAUACAUCGACGGAGGAGCAAGCCAGGAAGAAUUCUACAA | |
| | GUUCAUCAAGCCGAUCCUGGAAAAGAUGGACGGAACAGAAGAACUGCUGGUCAAGCUGAACAGAGAAGACCUGCUGAGAAAGCAGA | |
| | GAACAUUCGACAACGGAAGCAUCCCGCACCAGAUCCACCUGGGAGAACUGCACGCAAUCCUGAGAAGACAGGAAGACUUCUACCCG | |
| | UUCCUGAAGGACAACAGAGAAAAGAUCGAAAAGAUCCUGACAUUCAGAAUCCCGUACUACGUCGGACCGCUGGCAAGAGGAAACAG | |
| | CAGAUUCGCAUGGAUGACAAGAAAGAGCGAAGAAACAAUCACACCGUGGAACUUCGAAGAAGUCGUCGACAAGGGAGCAAGCGCAC | |
| | AGAGCUUCAUCGAAAGAAUGACAAACUUCGACAAGAACCUGCCGAACGAAAAGGUCCUGCCGAAGCACAGCCUGCUGUACGAAUAC | |
| | UUCACAGUCUACAACGAACUGACAAAGGUCAAGUACGUCACAGAAGGAAUGAGAAAGCCGGCAUUCCUGAGCGGAGAACAGAAGAA | |
| | GGCAAUCGUCGACCUGCUGUUCAAGACAAACAGAAAGGUCACAGUCAAGCAGCUGAAGGAAGACUACUUCAAGAAGAUCGAAUGCU | |
| | UCGACAGCGUCGAAAUCAGCGGAGUCGAAGACAGAUUCAACGCAAGCCUGGGAACAUACCACGACCUGCUGAAGAUCAUCAAGGAC | |
| | AAGGACUUCCUGGACAACGAAGAAAACGAAGACAUCCUGGAAGACAUCGUCCUGACACUGACACUGUUCGAAGACAGAGAAAUGAU | |
| | CGAAGAAAGACUGAAGACAUACGCACACCUGUUCGACGACAAGGUCAUGAAGCAGCUGAAGAGAAGAAGAUACACAGGAUGGGGAA | |
| | GACUGAGCAGAAAGCUGAUCAACGGAAUCAGAGACAAGCAGAGCGGAAAGACAAUCCUGGACUUCCUGAAGAGCGACGGAUUCGCA | |
| | AACAGAAACUUCAUGCAGCUGAUCCACGACGACAGCCUGACAUUCAAGGAAGACAUCCAGAAGGCACAGGUCAGCGGACAGGGAGA | |
| | CAGCCUGCACGAACACAUCGCAAACCUGGCAGGAAGCCCGGCAAUCAAGAAGGGAAUCCUGCAGACAGUCAAGGUCGUCGACGAAC | |
| | UGGUCAAGGUCAUGGGAAGACACAAGCCGGAAAACAUCGUCAUCGAAAUGGCAAGAGAAAACCAGACAACACAGAAGGGACAGAAG | |
| | AACAGCAGAGAAAGAAUGAAGAGAAUCGAAGAAGGAAUCAAGGAACUGGGAAGCCAGAUCCUGAAGGAACACCCGGUCGAAAACAC | |
| | ACAGCUGCAGAACGAAAAGCUGUACCUGUACUACCUGCAGAACGGAAGAGACAUGUACGUCGACCAGGAACUGGACAUCAACAGAC | |
| | UGAGCGACUACGACGUCGACGCAAUCGUCCCGCAGAGCUUCCUGAAGGACGACAGCAUCGACAACAAGGUCCUGACAAGAAGCGAC | |
| | AAGAACAGAGGAAAGAGCGACAACGUCCCGAGCGAAGAAGUCGUCAAGAAGAUGAAGAACUACUGGAGACAGCUGCUGAACGCAAA | |
| | GCUGAUCACACAGAGAAAGUUCGACAACCUGACAAAGGCAGAGAGAGGAGGACUGAGCGAACUGGACAAGGCAGGAUUCAUCAAGA | |
| | GACAGCUGGUCGAAACAAGACAGAUCACAAAGCACGUCGCACAGAUCCUGGACAGCAGAAUGAACACAAAGUACGACGAAAACGAC | |
| | AAGCUGAUCAGAGAAGUCAAGGUCAUCACACUGAAGAGCAAGCUGGUCAGCGACUUCAGAAAGGACUUCCAGUUCUACAAGGUCAG | |
| | AGAAAUCAACAACUACCACCACGCACACGACGCAUACCUGAACGCAGUCGUCGGAACAGCACUGAUCAAGAAGUACCCGAAGCUGG | |
| | AAAGCGAAUUCGUCUACGGAGACUACAAGGUCUACGACGUCAGAAAGAUGAUCGCAAAGAGCGAACAGGAAAUCGGAAAGGCAACA | |
| | GCAAAGUACUUCUUCUACAGCAACAUCAUGAACUUCUUCAAGACAGAAAUCACACUGGCAAACGGAGAAAUCAGAAAGAGACCGCU | |
| | GAUCGAAACAAACGGAGAAACAGGAGAAAUCGUCUGGGACAAGGGAAGAGACUUCGCAACAGUCAGAAAGGUCCUGAGCAUGCCGC | |
| | AGGUCAACAUCGUCAAGAAGACAGAAGUCCAGACAGGAGGAUUCAGCAAGGAAAGCAUCCUGCCGAAGAGAAACAGCGACAAGCUG | |
| | AUCGCAAGAAAGAAGGACUGGGACCCGAAGAAGUACGGAGGAUUCGACAGCCCGACAGUCGCAUACAGCGUCCUGGUCGUCGCAAA | |
| | GGUCGAAAAGGGAAAGAGCAAGAAGCUGAAGAGCGUCAAGGAACUGCUGGGAAUCACAAUCAUGGAAAGAAGCAGCUUCGAAAAGA | |
| | ACCCGAUCGACUUCCUGGAAGCAAAGGGAUACAAGGAAGUCAAGAAGGACCUGAUCAUCAAGCUGCCGAAGUACAGCCUGUUCGAA | |
| | CUGGAAAACGGAAGAAAGAGAAUGCUGGCAAGCGCAGGAGAACUGCAGAAGGGAAACGAACUGGCACUGCCGAGCAAGUACGUCAA | |
| | CUUCCUGUACCUGGCAAGCCACUACGAAAAGCUGAAGGGAAGCCCGGAAGACAACGAACAGAAGCAGCUGUUCGUCGAACAGCACA | |
| | AGCACUACCUGGACGAAAUCAUCGAACAGAUCAGCGAAUUCAGCAAGAGAGUCAUCCUGGCAGACGCAAACCUGGACAAGGUCCUG | |
| | AGCGCAUACAACAAGCACAGAGACAAGCCGAUCAGAGAACAGGCAGAAAACAUCAUCCACCUGUUCACACUGACAAACCUGGGAGC | |
| | ACCGGCAGCAUUCAAGUACUUCGACACAACAAUCGACAGAAAGAGAUACACAAGCACAAAGGAAGUCCUGGACGCAACACUGAUCC | |
| | ACCAGAGCAUCACAGGACUGUACGAAACAAGAAUCGACCUGAGCCAGCUGGGAGGAGACGGAGGAGGAAGCCCGAAGAAGAAGAGA | |
| | AAGGUC | |
| Amino acid | MDKKYSIGLDIGTNSVGWAVITDEYKVPSKKFKVLGNTDRHSIKKNLIGALLFDSGETAEATRLKRTARRRYTRRKNRICYLQEIF | 213 |
| sequence of | SNEMAKVDDSFFHRLEESFLVEEDKKHERHPIFGNIVDEVAYHEKYPTIYHLRKKLVDSTDKADLRLIYLALAHMIKFRGHFLIEG | |
| Cas9 | DLNPDNSDVDKLFIQLVQTYNQLFEENPINASGVDAKAILSARLSKSRRLENLIAQLPGEKKNGLFGNLIALSLGLTPNFKSNFDL | |
| (without NLS) | AEDAKLQLSKDTYDDDLDNLLAQIGDQYADLFLAAKNLSDAILLSDILRVNTEITKAPLSASMIKRYDEHHQDLTLLKALVRQQLP | |
| | EKYKEIFFDQSKNGYAGYIDGGASQEEFYKFIKPILEKMDGTEELLVKLNREDLLRKQRTFDNGSIPHQIHLGELHAILRRQEDFY | |
| | PFLKDNREKIEKILTFRIPYYVGPLARGNSRFAWMTRKSEETITPWNFEEVVDKGASAQSFIERMTNFDKNLPNEKVLPKHSLLYE | |
| | YFTVYNELTKVKYVTEGMRKPAFLSGEQKKAIVDLLFKTNRKVTVKQLKEDYFKKIECFDSVEISGVEDRFNASLGTYHDLLKIIK | |
| | DKDFLDNEENEDILEDIVLTLTLFEDREMIEERLKTYAHLFDDKVMKQLKRRRYTGWGRLSRKLINGIRDKQSGKTILDFLKSDGF | |
| | ANRNFMQLIHDDSLTFKEDIQKAQVSGQGDSLHEHIANLAGSPAIKKGILQTVKVVDELVKVMGRHKPENIVIEMARENQTTQKGQ | |
| | KNSRERMKRIEEGIKELGSQILKEHPVENTQLQNEKLYLYYLQNGRDMYVDQELDINRLSDYDVDHIVPQSFLKDDSIDNKVLTRS | |
| | DKNRGKSDNVPSEEVVKKMKNYWRQLLNAKLITQRKFDNLTKAERGGLSELDKAGFIKRQLVETRQITKHVAQILDSRMNTKYDEN | |
| | DKLIREVKVITLKSKLVSDFRKDFQFYKVREINNYHHAHDAYLNAVVGTALIKKYPKLESEFVYGDYKVYDVRKMIAKSEQEIGKA | |
| | TAKYFFYSNIMNFFKTEITLANGEIRKRPLIETNGETGEIVWDKGRDFATVRKVLSMPQVNIVKKTEVQTGGFSKESILPKRNSDK | |
| | LIARKKDWDPKKYGGFDSPTVAYSVLVVAKVEKGKSKKLKSVKELLGITIMERSSFEKNPIDFLEAKGYKEVKKDLIIKLPKYSLF | |
| | ELENGRKRMLASAGELQKGNELALPSKYVNFLYLASHYEKLKGSPEDNEQKQLFVEQHKHYLDEIIEQISEFSKRVILADANLDKV | |
| | LSAYNKHRDKPIREQAENIIHLFTLTNLGAPAAFKYFDTTIDRKRYTSTKEVLDATLIHQSITGLYETRIDLSQLGGD | |
| Cas9 mRNA | AUGGACAAGAAGUACAGCAUCGGACUGGACAUCGGAACAAACAGCGUCGGAUGGGCAGUCAUCACAGACGAAUACAAGGUCCCGAG | 214 |
| ORF encoding | CAAGAAGUUCAAGGUCCUGGGAAACACAGACAGACACAGCAUCAAGAAGAACCUGAUCGGAGCACUGCUGUUCGACAGCGGAGAAA | |
| SEQ ID NO: | CAGCAGAAGCAACAAGACUGAAGAGAACAGCAAGAAGAAGAUACACAAGAAGAAAGAACAGAAUCUGCUACCUGCAGGAAAUCUUC | |
| 13 using | AGCAACGAAAUGGCAAAGGUCGACGACAGCUUCUUCCACAGACUGGAAGAAAGCUUCCUGGUCGAAGAAGACAAGAAGCACGAAAG | |
| minimal | ACACCCGAUCUUCGGAAACAUCGUCGACGAAGUCGCAUACCACGAAAAGUACCCGACAAUCUACCACCUGAGAAAGAAGCUGGUCG | |
| uridine | ACAGCACAGACAAGGCAGACCUGAGACUGAUCUACCUGGCACUGGCACACAUGAUCAAGUUCAGAGGACACUUCCUGAUCGAAGGA | |
| codons as | GACCUGAACCCGGACAACAGCGACGUCGACAAGCUGUUCAUCCAGCUGGUCCAGACAUACAACCAGCUGUUCGAAGAAAACCCGAU | |
| listed in | CAACGCAAGCGGAGUCGACGCAAAGGCAAUCCUGAGCGCAAGACUGAGCAAGAGCAGAAGACUGGAAAACCUGAUCGCACAGCUGC | |
| Table 3, | CGGGAGAAAAGAAGAACGGACUGUUCGGAAACCUGAUCGCACUGAGCCUGGGACUGACACCGAACUUCAAGAGCAACUUCGACCUG | |
| with start | GCAGAAGACGCAAAGCUGCAGCUGAGCAAGGACACAUACGACGACGACCUGGACAACCUGCUGGCACAGAUCGGAGACCAGUACGC | |
| and stop | AGACCUGUUCCUGGCAGCAAAGAACCUGAGCGACGCAAUCCUGCUGAGCGACAUCCUGAGAGUCAACACAGAAAUCACAAAGGCAC | |
| codons | CGCUGAGCGCAAGCAUGAUCAAGAGAUACGACGAACACCACCAGGACCUGACACUGCUGAAGGCACUGGUCAGACAGCAGCUGCCG | |
| | GAAAAGUACAAGGAAAUCUUCUUCGACCAGAGCAAGAACGGAUACGCAGGAUACAUCGACGGAGGAGCAAGCCAGGAAGAAUUCUA | |
| | CAAGUUCAUCAAGCCGAUCCUGGAAAAGAUGGACGGAACAGAAGAACUGCUGGUCAAGCUGAACAGAGAAGACCUGCUGAGAAAGC | |
| | AGAGAACAUUCGACAACGGAAGCAUCCCGCACCAGAUCCACCUGGGAGAACUGCACGCAAUCCUGAGAAGACAGGAAGACUUCUAC | |
| | CCGUUCCUGAAGGACAACAGAGAAAAGAUCGAAAAGAUCCUGACAUUCAGAAUCCCGUACUACGUCGGACCGCUGGCAAGAGGAAA | |
| | CAGCAGAUUCGCAUGGAUGACAAGAAAGAGCGAAGAAACAAUCACACCGUGGAACUUCGAAGAAGUCGUCGACAAGGGAGCAAGCG | |
| | CACAGAGCUUCAUCGAAAGAAUGACAAACUUCGACAAGAACCUGCCGAACGAAAAGGUCCUGCCGAAGCACAGCCUGCUGUACGAA | |
| | UACUUCACAGUCUACAACGAACUGACAAAGGUCAAGUACGUCACAGAAGGAAUGAGAAAGCCGGCAUUCCUGAGCGGAGAACAGAA | |
| | GAAGGCAAUCGUCGACCUGCUGUUCAAGACAAACAGAAAGGUCACAGUCAAGCAGCUGAAGGAAGACUACUUCAAGAAGAUCGAAU | |
| | GCUUCGACAGCGUCGAAAUCAGCGGAGUCGAAGACAGAUUCAACGCAAGCCUGGGAACAUACCACGACCUGCUGAAGAUCAUCAAG | |
| | GACAAGGACUUCCUGGACAACGAAGAAAACGAAGACAUCCUGGAAGACAUCGUCCUGACACUGACACUGUUCGAAGACAGAGAAAU | |
| | GAUCGAAGAAAGACUGAAGACAUACGCACACCUGUUCGACGACAAGGUCAUGAAGCAGCUGAAGAGAAGAAGAUACACAGGAUGGG | |
| | GAAGACUGAGCAGAAAGCUGAUCAACGGAAUCAGAGACAAGCAGAGCGGAAAGACAAUCCUGGACUUCCUGAAGAGCGACGGAUUC | |
| | GCAAACAGAAACUUCAUGCAGCUGAUCCACGACGACAGCCUGACAUUCAAGGAAGACAUCCAGAAGGCACAGGUCAGCGGACAGGG | |
| | AGACAGCCUGCACGAACACAUCGCAAACCUGGCAGGAAGCCCGGCAAUCAAGAAGGGAAUCCUGCAGACAGUCAAGGUCGUCGACG | |
| | AACUGGUCAAGGUCAUGGGAAGACACAAGCCGGAAAACAUCGUCAUCGAAAUGGCAAGAGAAAACCAGACAACACAGAAGGGACAG | |
| | AAGAACAGCAGAGAAAGAAUGAAGAGAAUCGAAGAAGGAAUCAAGGAACUGGGAAGCCAGAUCCUGAAGGAACACCCGGUCGAAAA | |
| | CACACAGCUGCAGAACGAAAAGCUGUACCUGUACUACCUGCAGAACGGAAGAGACAUGUACGUCGACCAGGAACUGGACAUCAACA | |
| | GACUGAGCGACUACGACGUCGACCACAUCGUCCCGCAGAGCUUCCUGAAGGACGACAGCAUCGACAACAAGGUCCUGACAAGAAGC | |
| | GACAAGAACAGAGGAAAGAGCGACAACGUCCCGAGCGAAGAAGUCGUCAAGAAGAUGAAGAACUACUGGAGACAGCUGCUGAACGC | |
| | AAAGCUGAUCACACAGAGAAAGUUCGACAACCUGACAAAGGCAGAGAGAGGAGGACUGAGCGAACUGGACAAGGCAGGAUUCAUCA | |
| | AGAGACAGCUGGUCGAAACAAGACAGAUCACAAAGCACGUCGCACAGAUCCUGGACAGCAGAAUGAACACAAAGUACGACGAAAAC | |
| | GACAAGCUGAUCAGAGAAGUCAAGGUCAUCACACUGAAGAGCAAGCUGGUCAGCGACUUCAGAAAGGACUUCCAGUUCUACAAGGU | |
| | CAGAGAAAUCAACAACUACCACCACGCACACGACGCAUACCUGAACGCAGUCGUCGGAACAGCACUGAUCAAGAAGUACCCGAAGC | |
| | UGGAAAGCGAAUUCGUCUACGGAGACUACAAGGUCUACGACGUCAGAAAGAUGAUCGCAAAGAGCGAACAGGAAAUCGGAAAGGCA | |
| | ACAGCAAAGUACUUCUUCUACAGCAACAUCAUGAACUUCUUCAAGACAGAAAUCACACUGGCAAACGGAGAAAUCAGAAAGAGACC | |
| | GCUGAUCGAAACAAACGGAGAAACAGGAGAAAUCGUCUGGGACAAGGGAAGAGACUUCGCAACAGUCAGAAAGGUCCUGAGCAUGC | |
| | CGCAGGUCAACAUCGUCAAGAAGACAGAAGUCCAGACAGGAGGAUUCAGCAAGGAAAGCAUCCUGCCGAAGAGAAACAGCGACAAG | |
| | CUGAUCGCAAGAAAGAAGGACUGGGACCCGAAGAAGUACGGAGGAUUCGACAGCCCGACAGUCGCAUACAGCGUCCUGGUCGUCGC | |
| | AAAGGUCGAAAAGGGAAAGAGCAAGAAGCUGAAGAGCGUCAAGGAACUGCUGGGAAUCACAAUCAUGGAAAGAAGCAGCUUCGAAA | |
| | AGAACCCGAUCGACUUCCUGGAAGCAAAGGGAUACAAGGAAGUCAAGAAGGACCUGAUCAUCAAGCUGCCGAAGUACAGCCUGUUC | |
| | GAACUGGAAAACGGAAGAAAGAGAAUGCUGGCAAGCGCAGGAGAACUGCAGAAGGGAAACGAACUGGCACUGCCGAGCAAGUACGU | |
| | CAACUUCCUGUACCUGGCAAGCCACUACGAAAAGCUGAAGGGAAGCCCGGAAGACAACGAACAGAAGCAGCUGUUCGUCGAACAGC | |
| | ACAAGCACUACCUGGACGAAAUCAUCGAACAGAUCAGCGAAUUCAGCAAGAGAGUCAUCCUGGCAGACGCAAACCUGGACAAGGUC | |
| | CUGAGCGCAUACAACAAGCACAGAGACAAGCCGAUCAGAGAACAGGCAGAAAACAUCAUCCACCUGUUCACACUGACAAACCUGGG | |
| | AGCACCGGCAGCAUUCAAGUACUUCGACACAACAAUCGACAGAAAGAGAUACACAAGCACAAAGGAAGUCCUGGACGCAACACUGA | |
| | UCCACCAGAGCAUCACAGGACUGUACGAAACAAGAAUCGACCUGAGCCAGCUGGGAGGAGACUAG | |
| Cas9 coding | GACAAGAAGUACAGCAUCGGACUGGACAUCGGAACAAACAGCGUCGGAUGGGCAGUCAUCACAGACGAAUACAAGGUCCCGAGCAA | 215 |
| sequence | GAAGUUCAAGGUCCUGGGAAACACAGACAGACACAGCAUCAAGAAGAACCUGAUCGGAGCACUGCUGUUCGACAGCGGAGAAACAG | |
| encoding SEQ | CAGAAGCAACAAGACUGAAGAGAACAGCAAGAAGAAGAUACACAAGAAGAAAGAACAGAAUCUGCUACCUGCAGGAAAUCUUCAGC | |
| ID NO: 13 | AACGAAAUGGCAAAGGUCGACGACAGCUUCUUCCACAGACUGGAAGAAAGCUUCCUGGUCGAAGAAGACAAGAAGCACGAAAGACA | |
| using minimal | CCCGAUCUUCGGAAACAUCGUCGACGAAGUCGCAUACCACGAAAAGUACCCGACAAUCUACCACCUGAGAAAGAAGCUGGUCGACA | |
| uridine codons as | GCACAGACAAGGCAGACCUGAGACUGAUCUACCUGGCACUGGCACACAUGAUCAAGUUCAGAGGACACUUCCUGAUCGAAGGAGAC | |
| listed in | CUGAACCCGGACAACAGCGACGUCGACAAGCUGUUCAUCCAGCUGGUCCAGACAUACAACCAGCUGUUCGAAGAAAACCCGAUCAA | |
| Table 3 (no start | CGCAAGCGGAGUCGACGCAAAGGCAAUCCUGAGCGCAAGACUGAGCAAGAGCAGAAGACUGGAAAACCUGAUCGCACAGCUGCCGG | |
| or stop codons; | GAGAAAAGAAGAACGGACUGUUCGGAAACCUGAUCGCACUGAGCCUGGGACUGACACCGAACUUCAAGAGCAACUUCGACCUGGCA | |
| suitable for | GAAGACGCAAAGCUGCAGCUGAGCAAGGACACAUACGACGACGACCUGGACAACCUGCUGGCACAGAUCGGAGACCAGUACGCAGA | |
| inclusion in | CCUGUUCCUGGCAGCAAAGAACCUGAGCGACGCAAUCCUGCUGAGCGACAUCCUGAGAGUCAACACAGAAAUCACAAAGGCACCGC | |
| fusion protein | UGAGCGCAAGCAUGAUCAAGAGAUACGACGAACACCACCAGGACCUGACACUGCUGAAGGCACUGGUCAGACAGCAGCUGCCGGAA | |
| coding sequence) | AAGUACAAGGAAAUCUUCUUCGACCAGAGCAAGAACGGAUACGCAGGAUACAUCGACGGAGGAGCAAGCCAGGAAGAAUUCUACAA | |
| | GUUCAUCAAGCCGAUCCUGGAAAAGAUGGACGGAAGAGAAGAACUGCUGGUCAAGCUGAACAGAGAAGACCUGCUGAGAAAGCAGA | |
| | GAACAUUCGACAACGGAAGCAUCCCGCACCAGAUCCACCUGGGAGAACUGCACGCAAUCCUGAGAAGACAGGAAGACUUCUACCCG | |
| | UUCCUGAAGGACAACAGAGAAAAGAUCGAAAAGAUCCUGACAUUCAGAAUCCCGUACUACGUCGGACCGCUGGCAAGAGGAAACAG | |
| | CAGAUUCGCAUGGAUGACAAGAAAGAGCGAAGAAACAAUCACACCGUGGAACUUCGAAGAAGUCGUCGACAAGGGAGCAAGCGCAC | |
| | AGAGCUUCAUCGAAAGAAUGACAAACUUCGACAAGAACCUGCCGAACGAAAAGGUCCUGCCGAAGCACAGCCUGCUGUACGAAUAC | |
| | UUCACAGUCUACAACGAACUGACAAAGGUCAAGUACGUCACAGAAGGAAUGAGAAAGCCGGCAUUCCUGAGCGGAGAACAGAAGAA | |
| | GGCAAUCGUCGACCUGCUGUUCAAGACAAACAGAAAGGUCACAGUCAAGCAGCUGAAGGAAGACUACUUCAAGAAGAUCGAAUGCU | |
| | UCGACAGCGUCGAAAUCAGCGGAGUCGAAGACAGAUUCAACGCAAGCCUGGGAACAUACCACGACCUGCUGAAGAUCAUCAAGGAC | |
| | AAGGACUUCCUGGACAACGAAGAAAACGAAGACAUCCUGGAAGACAUCGUCCUGACACUGACACUGUUCGAAGACAGAGAAAUGAU | |
| | CGAAGAAAGACUGAAGACAUACGCACACCUGUUCGACGACAAGGUCAUGAAGCAGCUGAAGAGAAGAAGAUACACAGGAUGGGGAA | |
| | GACUGAGCAGAAAGCUGAUCAACGGAAUCAGAGACAAGCAGAGCGGAAAGACAAUCCUGGACUUCCUGAAGAGCGACGGAUUCGCA | |
| | AACAGAAACUUCAUGCAGCUGAUCCACGACGACAGCCUGACAUUCAAGGAAGACAUCCAGAAGGCACAGGUCAGCGGACAGGGAGA | |
| | CAGCCUGCACGAACACAUCGCAAACCUGGCAGGAAGCCCGGCAAUCAAGAAGGGAAUCCUGCAGACAGUCAAGGUCGUCGACGAAC | |
| | UGGUCAAGGUCAUGGGAAGACACAAGCCGGAAAACAUCGUCAUCGAAAUGGCAAGAGAAAACCAGACAACACAGAAGGGACAGAAG | |
| | AACAGCAGAGAAAGAAUGAAGAGAAUCGAAGAAGGAAUCAAGGAACUGGGAAGCCAGAUCCUGAAGGAACACCCGGUCGAAAACAC | |
| | ACAGCUGCAGAACGAAAAGCUGUACCUGUACUACCUGCAGAACGGAAGAGACAUGUACGUCGACCAGGAACUGGACAUCAACAGAC | |
| | UGAGCGACUACGACGUCGACCACAUCGUCCCGCAGAGCUUCCUGAAGGACGACAGCAUCGACAACAAGGUCCUGACAAGAAGCGAC | |
| | AAGAACAGAGGAAAGAGCGACAACGUCCCGAGCGAAGAAGUCGUCAAGAAGAUGAAGAACUACUGGAGACAGCUGCUGAACGCAAA | |
| | GCUGAUCACACAGAGAAAGUUCGACAACCUGACAAAGGCAGAGAGAGGAGGACUGAGCGAACUGGACAAGGCAGGAUUCAUCAAGA | |
| | GACAGCUGGUCGAAACAAGACAGAUCACAAAGCACGUCGCACAGAUCCUGGACAGCAGAAUGAACACAAAGUACGACGAAAACGAC | |
| | AAGCUGAUCAGAGAAGUCAAGGUCAUCACACUGAAGAGCAAGCUGGUCAGCGACUUCAGAAAGGACUUCCAGUUCUACAAGGUCAG | |
| | AGAAAUCAACAACUACCACCACGCACACGACGCAUACCUGAACGCAGUCGUCGGAACAGCACUGAUCAAGAAGUACCCGAAGCUGG | |
| | AAAGCGAAUUCGUCUACGGAGACUACAAGGUCUACGACGUCAGAAAGAUGAUCGCAAAGAGCGAACAGGAAAUCGGAAAGGCAACA | |
| | GCAAAGUACUUCUUCUACAGCAACAUCAUGAACUUCUUCAAGACAGAAAUCACACUGGCAAACGGAGAAAUCAGAAAGAGACCGCU | |
| | GAUCGAAACAAACGGAGAAACAGGAGAAAUCGUCUGGGACAAGGGAAGAGACUUCGCAACAGUCAGAAAGGUCCUGAGCAUGCCGC | |
| | AGGUCAACAUCGUCAAGAAGACAGAAGUCCAGACAGGAGGAUUCAGCAAGGAAAGCAUCCUGCCGAAGAGAAACAGCGACAAGCUG | |
| | AUCGCAAGAAAGAAGGACUGGGACCCGAAGAAGUACGGAGGAUUCGACAGCCCGACAGUCGCAUACAGCGUCCUGGUCGUCGCAAA | |
| | GGUCGAAAAGGGAAAGAGCAAGAAGCUGAAGAGCGUCAAGGAACUGCUGGGAAUCACAAUCAUGGAAAGAAGCAGCUUCGAAAAGA | |
| | ACCCGAUCGACUUCCUGGAAGCAAAGGGAUACAAGGAAGUCAAGAAGGACCUGAUCAUCAAGCUGCCGAAGUACAGCCUGUUCGAA | |
| | CUGGAAAACGGAAGAAAGAGAAUGCUGGCAAGCGCAGGAGAACUGCAGAAGGGAAACGAACUGGCACUGCCGAGCAAGUACGUCAA | |
| | CUUCCUGUACCUGGCAAGCCACUACGAAAAGCUGAAGGGAAGCCCGGAAGACAACGAACAGAAGCAGCUGUUCGUCGAACAGCACA | |
| | AGCACUACCUGGACGAAAUCAUCGAACAGAUCAGCGAAUUCAGCAAGAGAGUCAUCCUGGCAGACGCAAACCUGGACAAGGUCCUG | |
| | AGCGCAUACAACAAGCACAGAGACAAGCCGAUCAGAGAACAGGCAGAAAACAUCAUCCACCUGUUCACACUGACAAACCUGGGAGC | |
| | ACCGGCAGCAUUCAAGUACUUCGACACAACAAUCGACAGAAAGAGAUACACAAGCACAAAGGAAGUCCUGGACGCAACACUGAUCC | |
| | ACCAGAGCAUCACAGGACUGUACGAAACAAGAAUCGACCUGAGCCAGCUGGGAGGAGAC | |
| Amino acid | MDKKYSIGLAIGTNSVGWAVITDEYKVPSKKFKVLGNTDRHSIKKNLIGALLFDSGETAEATRLKRTARRRYTRRKNRICYLQEIF | 216 |
| sequence of | SNEMAKVDDSFFHRLEESFLVEEDKKHERHPIFGNIVDEVAYHEKYPTIYHLRKKLVDSTDKADLRLIYLALAHMIKFRGHFLIEG | |
| Cas9 nickase | DLNPDNSDVDKLFIQLVQTYNQLFEENPINASGVDAKAILSARLSKSRRLENLIAQLPGEKKNGLFGNLIALSLGLTPNFKSNFDL | |
| (without | AEDAKLQLSKDTYDDDLDNLLAQIGDQYADLFLAAKNLSDAILLSDILRVNTEITKAPLSASMIKRYDEHHQDLTLLKALVRQQLP | |
| NLS) | EKYKEIFFDQSKNGYAGYIDGGASQEEFYKFIKPILEKMDGTEELLVKLNREDLLRKQRTFDNGSIPHQIHLGELHAILRRQEDFY | |
| | PFLKDNREKIEKILTFRIPYYVGPLARGNSRFAWMTRKSEETITPWNFEEVVDKGASAQSFIERMTNFDKNLPNEKVLPKHSLLYE | |
| | YFTVYNELTKVKYVTEGMRKPAFLSGEQKKAIVDLLFKTNRKVTVKQLKEDYFKKIECFDSVEISGVEDRFNASLGTYHDLLKIIK | |
| | DKDFLDNEENEDILEDIVLTLTLFEDREMIEERLKTYAHLFDDKVMKQLKRRRYTGWGRLSRKLINGIRDKQSGKTILDFLKSDGF | |
| | ANRNFMQLIHDDSLTFKEDIQKAQVSGQGDSLHEHIANLAGSPAIKKGILQTVKVVDELVKVMGRHKPENIVIEMARENQTTQKGQ | |
| | KNSRERMKRIEEGIKELGSQILKEHPVENTQLQNEKLYLYYLQNGRDMYVDQELDINRLSDYDVDHIVPQSFLKDDSIDNKVLTRS | |
| | DKNRGKSDNVPSEEVVKKMKNYWRQLLNAKLITQRKFDNLTKAERGGLSELDKAGFIKRQLVETRQITKHVAQILDSRMNTKYDEN | |
| | DKLIREVKVITLKSKLVSDFRKDFQFYKVREINNYHHAHDAYLNAVVGTALIKKYPKLESEFVYGDYKVYDVRKMIAKSEQEIGKA | |
| | TAKYFFYSNIMNFFKTEITLANGEIRKRPLIETNGETGEIVWDKGRDFATVRKVLSMPQVNIVKKTEVQTGGFSKESILPKRNSDK | |
| | LIARKKDWDPKKYGGFDSPTVAYSVLVVAKVEKGKSKKLKSVKELLGITIMERSSFEKNPIDFLEAKGYKEVKKDLIIKLPKYSLF | |
| | ELENGRKRMLASAGELQKGNELALPSKYVNFLYLASHYEKLKGSPEDNEQKQLFVEQHKHYLDEIIEQISEFSKRVILADANLDKV | |
| | LSAYNKHRDKPIREQAENIIHLFTLTNLGAPAAFKYFDTTIDRKRYTSTKEVLDATLIHQSITGLYETRIDLSQLGGD | |
| Cas9 nickase | AUGGACAAGAAGUACAGCAUCGGACUGGCAAUCGGAACAAACAGCGUCGGAUGGGCAGUCAUCACAGACGAAUACAAGGUCCCGAG | 217 |
| mRNA ORF | CAAGAAGUUCAAGGUCCUGGGAAACACAGACAGACACAGCAUCAAGAAGAACCUGAUCGGAGCACUGCUGUUCGACAGCGGAGAAA | |
| encoding SEQ | CAGCAGAAGCAACAAGACUGAAGAGAACAGCAAGAAGAAGAUACACAAGAAGAAAGAACAGAAUCUGCUACCUGCAGGAAAUCUUC | |
| ID NO: 16 | AGCAACGAAAUGGCAAAGGUCGACGACAGCUUCUUCCACAGACUGGAAGAAAGCUUCCUGGUCGAAGAAGACAAGAAGCACGAAAG | |
| using | ACACCCGAUCUUCGGAAACAUCGUCGACGAAGUCGCAUACCACGAAAAGUACCCGACAAUCUACCACCUGAGAAAGAAGCUGGUCG | |
| minimal | ACAGCACAGACAAGGCAGACCUGAGACUGAUCUACCUGGCACUGGCACACAUGAUCAAGUUCAGAGGACACUUCCUGAUCGAAGGA | |
| uridine | GACCUGAACCCGGACAACAGCGACGUCGACAAGCUGUUCAUCCAGCUGGUCCAGACAUACAACCAGCUGUUCGAAGAAAACCCGAU | |
| codons as | CAACGCAAGCGGAGUCGACGCAAAGGCAAUCCUGAGCGCAAGACUGAGCAAGAGCAGAAGACUGGAAAACCUGAUCGCACAGCUGC | |
| listed in | CGGGAGAAAAGAAGAACGGACUGUUCGGAAACCUGAUCGCACUGAGCCUGGGACUGACACCGAACUUCAAGAGCAACUUCGACCUG | |
| Table 3, | GCAGAAGACGCAAAGCUGCAGCUGAGCAAGGACACAUACGACGACGACCUGGACAACCUGCUGGCACAGAUCGGAGACCAGUACGC | |
| with start | AGACCUGUUCCUGGCAGCAAAGAACCUGAGCGACGCAAUCCUGCUGAGCGACAUCCUGAGAGUCAACACAGAAAUCACAAAGGCAC | |
| and stop | CGCUGAGCGCAAGCAUGAUCAAGAGAUACGACGAACACCACCAGGACCUGACACUGCUGAAGGCACUGGUCAGACAGCAGCUGCCG | |
| codons | GAAAAGUACAAGGAAAUCUUCUUCGACCAGAGCAAGAACGGAUACGCAGGAUACAUCGACGGAGGAGCAAGCCAGGAAGAAUUCUA | |
| | CAAGUUCAUCAAGCCGAUCCUGGAAAAGAUGGACGGAACAGAAGAACUGCUGGUCAAGCUGAACAGAGAAGACCUGCUGAGAAAGC | |
| | AGAGAACAUUCGACAACGGAAGCAUCCCGCACCAGAUCCACCUGGGAGAACUGCACGCAAUCCUGAGAAGACAGGAAGACUUCUAC | |
| | CCGUUCCUGAAGGACAACAGAGAAAAGAUCGAAAAGAUCCUGACAUUCAGAAUCCCGUACUACGUCGGACCGCUGGCAAGAGGAAA | |
| | CAGCAGAUUCGCAUGGAUGACAAGAAAGAGCGAAGAAACAAUCACACCGUGGAACUUCGAAGAAGUCGUCGACAAGGGAGCAAGCG | |
| | CACAGAGCUUCAUCGAAAGAAUGACAAACUUCGACAAGAACCUGCCGAACGAAAAGGUCCUGCCGAAGCACAGCCUGCUGUACGAA | |
| | UACUUCACAGUCUACAACGAACUGACAAAGGUCAAGUACGUCACAGAAGGAAUGAGAAAGCCGGCAUUCCUGAGCGGAGAACAGAA | |
| | GAAGGCAAUCGUCGACCUGCUGUUCAAGACAAACAGAAAGGUCACAGUCAAGCAGCUGAAGGAAGACUACUUCAAGAAGAUCGAAU | |
| | GCUUCGACAGCGUCGAAAUCAGCGGAGUCGAAGACAGAUUCAACGCAAGCCUGGGAACAUACCACGACCUGCUGAAGAUCAUCAAG | |
| | GACAAGGACUUCCUGGACAACGAAGAAAACGAAGACAUCCUGGAAGACAUCGUCCUGACACUGACACUGUUCGAAGACAGAGAAAU | |
| | GAUCGAAGAAAGACUGAAGACAUACGCACACCUGUUCGACGACAAGGUCAUGAAGCAGCUGAAGAGAAGAAGAUACACAGGAUGGG | |
| | GAAGACUGAGCAGAAAGCUGAUCAACGGAAUCAGAGACAAGCAGAGCGGAAAGACAAUCCUGGACUUCCUGAAGAGCGACGGAUUC | |
| | GCAAACAGAAACUUCAUGCAGCUGAUCCACGACGACAGCCUGACAUUCAAGGAAGACAUCCAGAAGGCACAGGUCAGCGGACAGGG | |
| | AGACAGCCUGCACGAACACAUCGCAAACCUGGCAGGAAGCCCGGCAAUCAAGAAGGGAAUCCUGCAGACAGUCAAGGUCGUCGACG | |
| | AACUGGUCAAGGUCAUGGGAAGACACAAGCCGGAAAACAUCGUCAUCGAAAUGGCAAGAGAAAACCAGACAACACAGAAGGGACAG | |
| | AAGAACAGCAGAGAAAGAAUGAAGAGAAUCGAAGAAGGAAUCAAGGAACUGGGAAGCCAGAUCCUGAAGGAACACCCGGUCGAAAA | |
| | CACACAGCUGCAGAACGAAAAGCUGUACCUGUACUACCUGCAGAACGGAAGAGACAUGUACGUCGACCAGGAACUGGACAUCAACA | |
| | GACUGAGCGACUACGACGUCGACCACAUCGUCCCGCAGAGCUUCCUGAAGGACGACAGCAUCGACAACAAGGUCCUGACAAGAAGC | |
| | GACAAGAACAGAGGAAAGAGCGACAACGUCCCGAGCGAAGAAGUCGUCAAGAAGAUGAAGAACUACUGGAGACAGCUGCUGAACGC | |
| | AAAGCUGAUCACACAGAGAAAGUUCGACAACCUGACAAAGGCAGAGAGAGGAGGACUGAGCGAACUGGACAAGGCAGGAUUCAUCA | |
| | AGAGACAGCUGGUCGAAACAAGACAGAUCACAAAGCACGUCGCACAGAUCCUGGACAGCAGAAUGAACACAAAGUACGACGAAAAC | |
| | GACAAGCUGAUCAGAGAAGUCAAGGUCAUCACACUGAAGAGCAAGCUGGUCAGCGACUUCAGAAAGGACUUCCAGUUCUACAAGGU | |
| | CAGAGAAAUCAACAACUACCACCACGCACACGACGCAUACCUGAACGCAGUCGUCGGAACAGCACUGAUCAAGAAGUACCCGAAGC | |
| | UGGAAAGCGAAUUCGUCUACGGAGACUACAAGGUCUACGACGUCAGAAAGAUGAUCGCAAAGAGCGAACAGGAAAUCGGAAAGGCA | |
| | ACAGCAAAGUACUUCUUCUACAGCAACAUCAUGAACUUCUUCAAGACAGAAAUCACACUGGCAAACGGAGAAAUCAGAAAGAGACC | |
| | GCUGAUCGAAACAAACGGAGAAACAGGAGAAAUCGUCUGGGACAAGGGAAGAGACUUCGCAACAGUCAGAAAGGUCCUGAGCAUGC | |
| | CGCAGGUCAACAUCGUCAAGAAGACAGAAGUCCAGACAGGAGGAUUCAGCAAGGAAAGCAUCCUGCCGAAGAGAAACAGCGACAAG | |
| | CUGAUCGCAAGAAAGAAGGACUGGGACCCGAAGAAGUACGGAGGAUUCGACAGCCCGACAGUCGCAUACAGCGUCCUGGUCGUCGC | |
| | AAAGGUCGAAAAGGGAAAGAGCAAGAAGCUGAAGAGCGUCAAGGAACUGCUGGGAAUCACAAUCAUGGAAAGAAGCAGCUUCGAAA | |
| | AGAACCCGAUCGACUUCCUGGAAGCAAAGGGAUACAAGGAAGUCAAGAAGGACCUGAUCAUCAAGCUGCCGAAGUACAGCCUGUUC | |
| | GAACUGGAAAACGGAAGAAAGAGAAUGCUGGCAAGCGCAGGAGAACUGCAGAAGGGAAACGAACUGGCACUGCCGAGCAAGUACGU | |
| | CAACUUCCUGUACCUGGCAAGCCACUACGAAAAGCUGAAGGGAAGCCCGGAAGACAACGAACAGAAGCAGCUGUUCGUCGAACAGC | |
| | ACAAGCACUACCUGGACGAAAUCAUCGAACAGAUCAGCGAAUUCAGCAAGAGAGUCAUCCUGGCAGACGCAAACCUGGACAAGGUC | |
| | CUGAGCGCAUACAACAAGCACAGAGACAAGCCGAUCAGAGAACAGGCAGAAAACAUCAUCCACCUGUUCACACUGACAAACCUGGG | |
| | AGCACCGGCAGCAUUCAAGUACUUCGACACAACAAUCGACAGAAAGAGAUACACAAGCACAAAGGAAGUCCUGGACGCAACACUGA | |
| | UCCACCAGAGCAUCACAGGACUGUACGAAACAAGAAUCGACCUGAGCCAGCUGGGAGGAGACUAG | |
| Cas9 nickase | GACAAGAAGUACAGCAUCGGACUGGCAAUCGGAACAAACAGCGUCGGAUGGGCAGUCAUCACAGACGAAUACAAGGUCCCGAGCAA | 218 |
| coding | GAAGUUCAAGGUCCUGGGAAACACAGACAGACACAGCAUCAAGAAGAACCUGAUCGGAGCACUGCUGUUCGACAGCGGAGAAACAG | |
| sequence | CAGAAGCAACAAGACUGAAGAGAACAGCAAGAAGAAGAUACACAAGAAGAAAGAACAGAAUCUGCUACCUGCAGGAAAUCUUCAGC | |
| encoding SEQ | AACGAAAUGGCAAAGGUCGACGACAGCUUCUUCCACAGACUGGAAGAAAGCUUCCUGGUCGAAGAAGACAAGAAGCACGAAAGACA | |
| ID NO: 16 | CCCGAUCUUCGGAAACAUCGUCGACGAAGUCGCAUACCACGAAAAGUACCCGACAAUCUACCACCUGAGAAAGAAGCUGGUCGACA | |
| using | GCACAGACAAGGCAGACCUGAGACUGAUCUACCUGGCACUGGCACACAUGAUCAAGUUCAGAGGACACUUCCUGAUCGAAGGAGAC | |
| minimal | CUGAACCCGGACAACAGCGACGUCGACAAGCUGUUCAUCCAGCUGGUCCAGACAUACAACCAGCUGUUCGAAGAAAACCCGAUCAA | |
| uridine | CGCAAGCGGAGUCGACGCAAAGGCAAUCCUGAGCGCAAGACUGAGCAAGAGCAGAAGACUGGAAAACCUGAUCGCACAGCUGCCGG | |
| codons as | GAGAAAAGAAGAACGGACUGUUCGGAAACCUGAUCGCACUGAGCCUGGGACUGACACCGAACUUCAAGAGCAACUUCGACCUGGCA | |
| listed in | GAAGACGCAAAGCUGCAGCUGAGCAAGGACACAUACGACGACGACCUGGACAACCUGCUGGCACAGAUCGGAGACCAGUACGCAGA | |
| Table 3 (no | CCUGUUCCUGGCAGCAAAGAACCUGAGCGACGCAAUCCUGCUGAGCGACAUCCUGAGAGUCAACACAGAAAUCACAAAGGCACCGC | |
| start or | UGAGCGCAAGCAUGAUCAAGAGAUACGACGAACACCACCAGGACCUGACACUGCUGAAGGCACUGGUCAGACAGCAGCUGCCGGAA | |
| stop codons; | AAGUACAAGGAAAUCUUCUUCGACCAGAGCAAGAACGGAUACGCAGGAUACAUCGACGGAGGAGCAAGCCAGGAAGAAUUCUACAA | |
| suitable for | GUUCAUCAAGCCGAUCCUGGAAAAGAUGGACGGAACAGAAGAACUGCUGGUCAAGCUGAACAGAGAAGACCUGCUGAGAAAGCAGA | |
| inclusion in | GAACAUUCGACAACGGAAGCAUCCCGCACCAGAUCCACCUGGGAGAACUGCACGCAAUCCUGAGAAGACAGGAAGACUUCUACCCG | |
| fusion | UUCCUGAAGGACAACAGAGAAAAGAUCGAAAAGAUCCUGACAUUCAGAAUCCCGUACUACGUCGGACCGCUGGCAAGAGGAAACAG | |
| protein | CAGAUUCGCAUGGAUGACAAGAAAGAGCGAAGAAACAAUCACACCGUGGAACUUCGAAGAAGUCGUCGACAAGGGAGCAAGCGCAC | |
| coding | AGAGCUUCAUCGAAAGAAUGACAAACUUCGACAAGAACCUGCCGAACGAAAAGGUCCUGCCGAAGCACAGCCUGCUGUACGAAUAC | |
| sequence) | UUCACAGUCUACAACGAACUGACAAAGGUCAAGUACGUCACAGAAGGAAUGAGAAAGCCGGCAUUCCUGAGCGGAGAACAGAAGAA | |
| | GGCAAUCGUCGACCUGCUGUUCAAGACAAACAGAAAGGUCACAGUCAAGCAGCUGAAGGAAGACUACUUCAAGAAGAUCGAAUGCU | |
| | UCGACAGCGUCGAAAUCAGCGGAGUCGAAGACAGAUUCAACGCAAGCCUGGGAACAUACCACGACCUGCUGAAGAUCAUCAAGGAC | |
| | AAGGACUUCCUGGACAACGAAGAAAACGAAGACAUCCUGGAAGACAUCGUCCUGACACUGACACUGUUCGAAGACAGAGAAAUGAU | |
| | CGAAGAAAGACUGAAGACAUACGCACACCUGUUCGACGACAAGGUCAUGAAGCAGCUGAAGAGAAGAAGAUACACAGGAUGGGGAA | |
| | GACUGAGCAGAAAGCUGAUCAACGGAAUCAGAGACAAGCAGAGCGGAAAGACAAUCCUGGACUUCCUGAAGAGCGACGGAUUCGCA | |
| | AACAGAAACUUCAUGCAGCUGAUCCACGACGACAGCCUGACAUUCAAGGAAGACAUCCAGAAGGCACAGGUCAGCGGACAGGGAGA | |
| | CAGCCUGCACGAACACAUCGCAAACCUGGCAGGAAGCCCGGCAAUCAAGAAGGGAAUCCUGCAGACAGUCAAGGUCGUCGACGAAC | |
| | UGGUCAAGGUCAUGGGAAGACACAAGCCGGAAAACAUCGUCAUCGAAAUGGCAAGAGAAAACCAGACAACACAGAAGGGACAGAAG | |
| | AACAGCAGAGAAAGAAUGAAGAGAAUCGAAGAAGGAAUCAAGGAACUGGGAAGCCAGAUCCUGAAGGAACACCCGGUCGAAAACAC | |
| | ACAGCUGCAGAACGAAAAGCUGUACCUGUACUACCUGCAGAACGGAAGAGACAUGUACGUCGACCAGGAACUGGACAUCAACAGAC | |
| | UGAGCGACUACGACGUCGACCACAUCGUCCCGCAGAGCUUCCUGAAGGACGACAGCAUCGACAACAAGGUCCUGACAAGAAGCGAC | |
| | AAGAACAGAGGAAAGAGCGACAACGUCCCGAGCGAAGAAGUCGUCAAGAAGAUGAAGAACUACUGGAGACAGCUGCUGAACGCAAA | |
| | GCUGAUCACACAGAGAAAGUUCGACAACCUGACAAAGGCAGAGAGAGGAGGACUGAGCGAACUGGACAAGGCAGGAUUCAUCAAGA | |
| | GACAGCUGGUCGAAACAAGACAGAUCACAAAGCACGUCGCACAGAUCCUGGACAGCAGAAUGAACACAAAGUACGACGAAAACGAC | |
| | AAGCUGAUCAGAGAAGUCAAGGUCAUCACACUGAAGAGCAAGCUGGUCAGCGACUUCAGAAAGGACUUCCAGUUCUACAAGGUCAG | |
| | AGAAAUCAACAACUACCACCACGCACACGACGCAUACCUGAACGCAGUCGUCGGAACAGCACUGAUCAAGAAGUACCCGAAGCUGG | |
| | AAAGCGAAUUCGUCUACGGAGACUACAAGGUCUACGACGUCAGAAAGAUGAUCGCAAAGAGCGAACAGGAAAUCGGAAAGGCAACA | |
| | GCAAAGUACUUCUUCUACAGCAACAUCAUGAACUUCUUCAAGACAGAAAUCACACUGGCAAACGGAGAAAUCAGAAAGAGACCGCU | |
| | GAUCGAAACAAACGGAGAAACAGGAGAAAUCGUCUGGGACAAGGGAAGAGACUUCGCAACAGUCAGAAAGGUCCUGAGCAUGCCGC | |
| | AGGUCAACAUCGUCAAGAAGACAGAAGUCCAGACAGGAGGAUUCAGCAAGGAAAGCAUCCUGCCGAAGAGAAACAGCGACAAGCUG | |
| | AUCGCAAGAAAGAAGGACUGGGACCCGAAGAAGUACGGAGGAUUCGACAGCCCGACAGUCGCAUACAGCGUCCUGGUCGUCGCAAA | |
| | GGUCGAAAAGGGAAAGAGCAAGAAGCUGAAGAGCGUCAAGGAACUGCUGGGAAUCACAAUCAUGGAAAGAAGCAGCUUCGAAAAGA | |
| | ACCCGAUCGACUUCCUGGAAGCAAAGGGAUACAAGGAAGUCAAGAAGGACCUGAUCAUCAAGCUGCCGAAGUACAGCCUGUUCGAA | |
| | CUGGAAAACGGAAGAAAGAGAAUGCUGGCAAGCGCAGGAGAACUGCAGAAGGGAAACGAACUGGCACUGCCGAGCAAGUACGUCAA | |
| | CUUCCUGUACCUGGCAAGCCACUACGAAAAGCUGAAGGGAAGCCCGGAAGACAACGAACAGAAGCAGCUGUUCGUCGAACAGCACA | |
| | AGCACUACCUGGACGAAAUCAUCGAACAGAUCAGCGAAUUCAGCAAGAGAGUCAUCCUGGCAGACGCAAACCUGGACAAGGUCCUG | |
| | AGCGCAUACAACAAGCACAGAGACAAGCCGAUCAGAGAACAGGCAGAAAACAUCAUCCACCUGUUCACACUGACAAACCUGGGAGC | |
| | ACCGGCAGCAUUCAAGUACUUCGACACAACAAUCGACAGAAAGAGAUACACAAGCACAAAGGAAGUCCUGGACGCAACACUGAUCC | |
| | ACCAGAGCAUCACAGGACUGUACGAAACAAGAAUCGACCUGAGCCAGCUGGGAGGAGAC | |
| Amino acid | MDKKYSIGLAIGTNSVGWAVITDEYKVPSKKFKVLGNTDRHSIKKNLIGALLFDSGETAEATRLKRTARRRYTRRKNRICYLQEIF | 219 |
| sequence of | SNEMAKVDDSFFHRLEESFLVEEDKKHERHPIFGNIVDEVAYHEKYPTIYHLRKKLVDSTDKADLRLIYLALAHMIKFRGHFLIEG | |
| dCas9 | DLNPDNSDVDKLFIQLVQTYNQLFEENPINASGVDAKAILSARLSKSRRLENLIAQLPGEKKNGLFGNLIALSLGLTPNFKSNFDL | |
| (without | AEDAKLQLSKDTYDDDLDNLLAQIGDQYADLFLAAKNLSDAILLSDILRVNTEITKAPLSASMIKRYDEHHQDLTLLKALVRQQLP | |
| NLS) | EKYKEIFFDQSKNGYAGYIDGGASQEEFYKFIKPILEKMDGTEELLVKLNREDLLRKQRTFDNGSIPHQIHLGELHAILRRQEDFY | |
| | PFLKDNREKIEKILTFRIPYYVGPLARGNSRFAWMTRKSEETITPWNFEEVVDKGASAQSFIERMTNFDKNLPNEKVLPKHSLLYE | |
| | YFTVYNELTKVKYVTEGMRKPAFLSGEQKKAIVDLLFKTNRKVTVKQLKEDYFKKIECFDSVEISGVEDRFNASLGTYHDLLKIIK | |
| | DKDFLDNEENEDILEDIVLTLTLFEDREMIEERLKTYAHLFDDKVMKQLKRRRYTGWGRLSRKLINGIRDKQSGKTILDFLKSDGF | |
| | ANRNFMQLIHDDSLTFKEDIQKAQVSGQGDSLHEHIANLAGSPAIKKGILQTVKVVDELVKVMGRHKPENIVIEMARENQTTQKGQ | |
| | KNSRERMKRIEEGIKELGSQILKEHPVENTQLQNEKLYLYYLQNGRDMYVDQELDINRLSDYDVDAIVPQSFLKDDSIDNKVLTRS | |
| | DKNRGKSDNVPSEEVVKKMKNYWRQLLNAKLITQRKFDNLTKAERGGLSELDKAGFIKRQLVETRQITKHVAQILDSRMNTKYDEN | |
| | DKLIREVKVITLKSKLVSDFRKDFQFYKVREINNYHHAHDAYLNAVVGTALIKKYPKLESEFVYGDYKVYDVRKMIAKSEQEIGKA | |
| | TAKYFFYSNIMNFFKTEITLANGEIRKRPLIETNGETGEIVWDKGRDFATVRKVLSMPQVNIVKKTEVQTGGFSKESILPKRNSDK | |
| | LIARKKDWDPKKYGGFDSPTVAYSVLVVAKVEKGKSKKLKSVKELLGITIMERSSFEKNPIDFLEAKGYKEVKKDLIIKLPKYSLF | |
| | ELENGRKRMLASAGELQKGNELALPSKYVNFLYLASHYEKLKGSPEDNEQKQLFVEQHKHYLDEIIEQISEFSKRVILADANLDKV | |
| | LSAYNKHRDKPIREQAENIIHLFTLTNLGAPAAFKYFDTTIDRKRYTSTKEVLDATLIHQSITGLYETRIDLSQLGGD | |
| dCas9 mRNA | AUGGACAAGAAGUACAGCAUCGGACUGGCAAUCGGAACAAACAGCGUCGGAUGGGCAGUCAUCACAGACGAAUACAAGGUCCCGAG | 220 |
| ORF encoding | CAAGAAGUUCAAGGUCCUGGGAAACACAGACAGACACAGCAUCAAGAAGAACCUGAUCGGAGCACUGCUGUUCGACAGCGGAGAAA | |
| SEQ ID NO: | CAGCAGAAGCAACAAGACUGAAGAGAACAGCAAGAAGAAGAUACACAAGAAGAAAGAACAGAAUCUGCUACCUGCAGGAAAUCUUC | |
| 19 using | AGCAACGAAAUGGCAAAGGUCGACGACAGCUUCUUCCACAGACUGGAAGAAAGCUUCCUGGUCGAAGAAGACAAGAAGCACGAAAG | |
| minimal | ACACCCGAUCUUCGGAAACAUCGUCGACGAAGUCGCAUACCACGAAAAGUACCCGACAAUCUACCACCUGAGAAAGAAGCUGGUCG | |
| uridine | ACAGCACAGACAAGGCAGACCUGAGACUGAUCUACCUGGCACUGGCACACAUGAUCAAGUUCAGAGGACACUUCCUGAUCGAAGGA | |
| codons as | GACCUGAACCCGGACAACAGCGACGUCGACAAGCUGUUCAUCCAGCUGGUCCAGACAUACAACCAGCUGUUCGAAGAAAACCCGAU | |
| listed in | CAACGCAAGCGGAGUCGACGCAAAGGCAAUCCUGAGCGCAAGACUGAGCAAGAGCAGAAGACUGGAAAACCUGAUCGCACAGCUGC | |
| Table 3, | CGGGAGAAAAGAAGAACGGACUGUUCGGAAACCUGAUCGCACUGAGCCUGGGACUGACACCGAACUUCAAGAGCAACUUCGACCUG | |
| with start | GCAGAAGACGCAAAGCUGCAGCUGAGCAAGGACACAUACGACGACGACCUGGACAACCUGCUGGCACAGAUCGGAGACCAGUACGC | |
| and stop | AGACCUGUUCCUGGCAGCAAAGAACCUGAGCGACGCAAUCCUGCUGAGCGACAUCCUGAGAGUCAACACAGAAAUCACAAAGGCAC | |
| codons | CGCUGAGCGCAAGCAUGAUCAAGAGAUACGACGAACACCACCAGGACCUGACACUGCUGAAGGCACUGGUCAGACAGCAGCUGCCG | |
| | GAAAAGUACAAGGAAAUCUUCUUCGACCAGAGCAAGAACGGAUACGCAGGAUACAUCGACGGAGGAGCAAGCCAGGAAGAAUUCUA | |
| | CAAGUUCAUCAAGCCGAUCCUGGAAAAGAUGGACGGAACAGAAGAACUGCUGGUCAAGCUGAACAGAGAAGACCUGCUGAGAAAGC | |
| | AGAGAACAUUCGACAACGGAAGCAUCCCGCACCAGAUCCACCUGGGAGAACUGCACGCAAUCCUGAGAAGACAGGAAGACUUCUAC | |
| | CCGUUCCUGAAGGACAACAGAGAAAAGAUCGAAAAGAUCCUGACAUUCAGAAUCCCGUACUACGUCGGACCGCUGGCAAGAGGAAA | |
| | CAGCAGAUUCGCAUGGAUGACAAGAAAGAGCGAAGAAACAAUCACACCGUGGAACUUCGAAGAAGUCGUCGACAAGGGAGCAAGCG | |
| | CACAGAGCUUCAUCGAAAGAAUGACAAACUUCGACAAGAACCUGCCGAACGAAAAGGUCCUGCCGAAGCACAGCCUGCUGUACGAA | |
| | UACUUCACAGUCUACAACGAACUGACAAAGGUCAAGUACGUCACAGAAGGAAUGAGAAAGCCGGCAUUCCUGAGCGGAGAACAGAA | |
| | GAAGGCAAUCGUCGACCUGCUGUUCAAGACAAACAGAAAGGUCACAGUCAAGCAGCUGAAGGAAGACUACUUCAAGAAGAUCGAAU | |
| | GCUUCGACAGCGUCGAAAUCAGCGGAGUCGAAGACAGAUUCAACGCAAGCCUGGGAACAUACCACGACCUGCUGAAGAUCAUCAAG | |
| | GACAAGGACUUCCUGGACAACGAAGAAAACGAAGACAUCCUGGAAGACAUCGUCCUGACACUGACACUGUUCGAAGACAGAGAAAU | |
| | GAUCGAAGAAAGACUGAAGACAUACGCACACCUGUUCGACGACAAGGUCAUGAAGCAGCUGAAGAGAAGAAGAUACACAGGAUGGG | |
| | GAAGACUGAGCAGAAAGCUGAUCAACGGAAUCAGAGACAAGCAGAGCGGAAAGACAAUCCUGGACUUCCUGAAGAGCGACGGAUUC | |
| | GCAAACAGAAACUUCAUGCAGCUGAUCCACGACGACAGCCUGACAUUCAAGGAAGACAUCCAGAAGGCACAGGUCAGCGGACAGGG | |
| | AGACAGCCUGCACGAACACAUCGCAAACCUGGCAGGAAGCCCGGCAAUCAAGAAGGGAAUCCUGCAGACAGUCAAGGUCGUCGACG | |
| | AACUGGUCAAGGUCAUGGGAAGACACAAGCCGGAAAACAUCGUCAUCGAAAUGGCAAGAGAAAACCAGACAACACAGAAGGGACAG | |
| | AAGAACAGCAGAGAAAGAAUGAAGAGAAUCGAAGAAGGAAUCAAGGAACUGGGAAGCCAGAUCCUGAAGGAACACCCGGUCGAAAA | |
| | CACACAGCUGCAGAACGAAAAGCUGUACCUGUACUACCUGCAGAACGGAAGAGACAUGUACGUCGACCAGGAACUGGACAUCAACA | |
| | GACUGAGCGACUACGACGUCGACGCAAUCGUCCCGCAGAGCUUCCUGAAGGACGACAGCAUCGACAACAAGGUCCUGACAAGAAGC | |
| | GACAAGAACAGAGGAAAGAGCGACAACGUCCCGAGCGAAGAAGUCGUCAAGAAGAUGAAGAACUACUGGAGACAGCUGCUGAACGC | |
| | AAAGCUGAUCACACAGAGAAAGUUCGACAACCUGACAAAGGCAGAGAGAGGAGGACUGAGCGAACUGGACAAGGCAGGAUUCAUCA | |
| | AGAGACAGCUGGUCGAAACAAGACAGAUCACAAAGCACGUCGCACAGAUCCUGGACAGCAGAAUGAACACAAAGUACGACGAAAAC | |
| | GACAAGCUGAUCAGAGAAGUCAAGGUCAUCACACUGAAGAGCAAGCUGGUCAGCGACUUCAGAAAGGACUUCCAGUUCUACAAGGU | |
| | CAGAGAAAUCAACAACUACCACCACGCACACGACGCAUACCUGAACGCAGUCGUCGGAACAGCACUGAUCAAGAAGUACCCGAAGC | |
| | UGGAAAGCGAAUUCGUCUACGGAGACUACAAGGUCUACGACGUCAGAAAGAUGAUCGCAAAGAGCGAACAGGAAAUCGGAAAGGCA | |
| | ACAGCAAAGUACUUCUUCUACAGCAACAUCAUGAACUUCUUCAAGACAGAAAUCACACUGGCAAACGGAGAAAUCAGAAAGAGACC | |
| | GCUGAUCGAAACAAACGGAGAAACAGGAGAAAUCGUCUGGGACAAGGGAAGAGACUUCGCAACAGUCAGAAAGGUCCUGAGCAUGC | |
| | CGCAGGUCAACAUCGUCAAGAAGACAGAAGUCCAGACAGGAGGAUUCAGCAAGGAAAGCAUCCUGCCGAAGAGAAACAGCGACAAG | |
| | CUGAUCGCAAGAAAGAAGGACUGGGACCCGAAGAAGUACGGAGGAUUCGACAGCCCGACAGUCGCAUACAGCGUCCUGGUCGUCGC | |
| | AAAGGUCGAAAAGGGAAAGAGCAAGAAGCUGAAGAGCGUCAAGGAACUGCUGGGAAUCACAAUCAUGGAAAGAAGCAGCUUCGAAA | |
| | AGAACCCGAUCGACUUCCUGGAAGCAAAGGGAUACAAGGAAGUCAAGAAGGACCUGAUCAUCAAGCUGCCGAAGUACAGCCUGUUC | |
| | GAACUGGAAAACGGAAGAAAGAGAAUGCUGGCAAGCGCAGGAGAACUGCAGAAGGGAAACGAACUGGCACUGCCGAGCAAGUACGU | |
| | CAACUUCCUGUACCUGGCAAGCCACUACGAAAAGCUGAAGGGAAGCCCGGAAGACAACGAACAGAAGCAGCUGUUCGUCGAACAGC | |
| | ACAAGCACUACCUGGACGAAAUCAUCGAACAGAUCAGCGAAUUCAGCAAGAGAGUCAUCCUGGCAGACGCAAACCUGGACAAGGUC | |
| | CUGAGCGCAUACAACAAGCACAGAGACAAGCCGAUCAGAGAACAGGCAGAAAACAUCAUCCACCUGUUCACACUGACAAACCUGGG | |
| | AGCACCGGCAGCAUUCAAGUACUUCGACACAACAAUCGACAGAAAGAGAUACACAAGCACAAAGGAAGUCCUGGACGCAACACUGA | |
| | UCCACCAGAGCAUCACAGGACUGUACGAAACAAGAAUCGACCUGAGCCAGCUGGGAGGAGACUAG | |
| dCas9 coding | GACAAGAAGUACAGCAUCGGACUGGCAAUCGGAACAAACAGCGUCGGAUGGGCAGUCAUCACAGACGAAUACAAGGUCCCGAGCAA | 221 |
| sequence | GAAGUUCAAGGUCCUGGGAAACACAGACAGACACAGCAUCAAGAAGAACCUGAUCGGAGCACUGCUGUUCGACAGCGGAGAAACAG | |
| encoding SEQ | CAGAAGCAACAAGACUGAAGAGAACAGCAAGAAGAAGAUACACAAGAAGAAAGAACAGAAUCUGCUACCUGCAGGAAAUCUUCAGC | |
| ID NO: 19 | AACGAAAUGGCAAAGGUCGACGACAGCUUCUUCCACAGACUGGAAGAAAGCUUCCUGGUCGAAGAAGACAAGAAGCACGAAAGACA | |
| using | CCCGAUCUUCGGAAACAUCGUCGACGAAGUCGCAUACCACGAAAAGUACCCGACAAUCUACCACCUGAGAAAGAAGCUGGUCGACA | |
| minimal | GCACAGACAAGGCAGACCUGAGACUGAUCUACCUGGCACUGGCACACAUGAUCAAGUUCAGAGGACACUUCCUGAUCGAAGGAGAC | |
| uridine | CUGAACCCGGACAACAGCGACGUCGACAAGCUGUUCAUCCAGCUGGUCCAGACAUACAACCAGCUGUUCGAAGAAAACCCGAUCAA | |
| codons as | CGCAAGCGGAGUCGACGCAAAGGCAAUCCUGAGCGCAAGACUGAGCAAGAGCAGAAGACUGGAAAACCUGAUCGCACAGCUGCCGG | |
| listed in | GAGAAAAGAAGAACGGACUGUUCGGAAACCUGAUCGCACUGAGCCUGGGACUGACACCGAACUUCAAGAGCAACUUCGACCUGGCA | |
| Table 3 (no | GAAGACGCAAAGCUGCAGCUGAGCAAGGACACAUACGACGACGACCUGGACAACCUGCUGGCACAGAUCGGAGACCAGUACGCAGA | |
| start or | CCUGUUCCUGGCAGCAAAGAACCUGAGCGACGCAAUCCUGCUGAGCGACAUCCUGAGAGUCAACACAGAAAUCACAAAGGCACCGC | |
| stop codons; | UGAGCGCAAGCAUGAUCAAGAGAUACGACGAACACCACCAGGACCUGACACUGCUGAAGGCACUGGUCAGACAGCAGCUGCCGGAA | |
| suitable for | AAGUACAAGGAAAUCUUCUUCGACCAGAGCAAGAACGGAUACGCAGGAUACAUCGACGGAGGAGCAAGCCAGGAAGAAUUCUACAA | |
| inclusion in | GUUCAUCAAGCCGAUCCUGGAAAAGAUGGACGGAACAGAAGAACUGCUGGUCAAGCUGAACAGAGAAGACCUGCUGAGAAAGCAGA | |
| fusion | GAACAUUCGACAACGGAAGCAUCCCGCACCAGAUCCACCUGGGAGAACUGCACGCAAUCCUGAGAAGACAGGAAGACUUCUACCCG | |
| protein | UUCCUGAAGGACAACAGAGAAAAGAUCGAAAAGAUCCUGACAUUCAGAAUCCCGUACUACGUCGGACCGCUGGCAAGAGGAAACAG | |
| coding | CAGAUUCGCAUGGAUGACAAGAAAGAGCGAAGAAACAAUCACACCGUGGAACUUCGAAGAAGUCGUCGACAAGGGAGCAAGCGCAC | |
| sequence) | AGAGCUUCAUCGAAAGAAUGACAAACUUCGACAAGAACCUGCCGAACGAAAAGGUCCUGCCGAAGCACAGCCUGCUGUACGAAUAC | |
| | UUCACAGUCUACAACGAACUGACAAAGGUCAAGUACGUCACAGAAGGAAUGAGAAAGCCGGCAUUCCUGAGCGGAGAACAGAAGAA | |
| | GGCAAUCGUCGACCUGCUGUUCAAGACAAACAGAAAGGUCACAGUCAAGCAGCUGAAGGAAGACUACUUCAAGAAGAUCGAAUGCU | |
| | UCGACAGCGUCGAAAUCAGCGGAGUCGAAGACAGAUUCAACGCAAGCCUGGGAACAUACCACGACCUGCUGAAGAUCAUCAAGGAC | |
| | AAGGACUUCCUGGACAACGAAGAAAACGAAGACAUCCUGGAAGACAUCGUCCUGACACUGACACUGUUCGAAGACAGAGAAAUGAU | |
| | CGAAGAAAGACUGAAGACAUACGCACACCUGUUCGACGACAAGGUCAUGAAGCAGCUGAAGAGAAGAAGAUACACAGGAUGGGGAA | |
| | GACUGAGCAGAAAGCUGAUCAACGGAAUCAGAGACAAGCAGAGCGGAAAGACAAUCCUGGACUUCCUGAAGAGCGACGGAUUCGCA | |
| | AACAGAAACUUCAUGCAGCUGAUCCACGACGACAGCCUGACAUUCAAGGAAGACAUCCAGAAGGCACAGGUCAGCGGACAGGGAGA | |
| | CAGCCUGCACGAACACAUCGCAAACCUGGCAGGAAGCCCGGCAAUCAAGAAGGGAAUCCUGCAGACAGUCAAGGUCGUCGACGAAC | |
| | UGGUCAAGGUCAUGGGAAGACACAAGCCGGAAAACAUCGUCAUCGAAAUGGCAAGAGAAAACCAGACAACACAGAAGGGACAGAAG | |
| | AACAGCAGAGAAAGAAUGAAGAGAAUCGAAGAAGGAAUCAAGGAACUGGGAAGCCAGAUCCUGAAGGAACACCCGGUCGAAAACAC | |
| | ACAGCUGCAGAACGAAAAGCUGUACCUGUACUACCUGCAGAACGGAAGAGACAUGUACGUCGACCAGGAACUGGACAUCAACAGAC | |
| | UGAGCGACUACGACGUCGACGCAAUCGUCCCGCAGAGCUUCCUGAAGGACGACAGCAUCGACAACAAGGUCCUGACAAGAAGCGAC | |
| | AAGAACAGAGGAAAGAGCGACAACGUCCCGAGCGAAGAAGUCGUCAAGAAGAUGAAGAACUACUGGAGACAGCUGCUGAACGCAAA | |
| | GCUGAUCACACAGAGAAAGUUCGACAACCUGACAAAGGCAGAGAGAGGAGGACUGAGCGAACUGGACAAGGCAGGAUUCAUCAAGA | |
| | GACAGCUGGUCGAAACAAGACAGAUCACAAAGCACGUCGCACAGAUCCUGGACAGCAGAAUGAACACAAAGUACGACGAAAACGAC | |
| | AAGCUGAUCAGAGAAGUCAAGGUCAUCACACUGAAGAGCAAGCUGGUCAGCGACUUCAGAAAGGACUUCCAGUUCUACAAGGUCAG | |
| | AGAAAUCAACAACUACCACCACGCACACGACGCAUACCUGAACGCAGUCGUCGGAACAGCACUGAUCAAGAAGUACCCGAAGCUGG | |
| | AAAGCGAAUUCGUCUACGGAGACUACAAGGUCUACGACGUCAGAAAGAUGAUCGCAAAGAGCGAACAGGAAAUCGGAAAGGCAACA | |
| | GCAAAGUACUUCUUCUACAGCAACAUCAUGAACUUCUUCAAGACAGAAAUCACACUGGCAAACGGAGAAAUCAGAAAGAGACCGCU | |
| | GAUCGAAACAAACGGAGAAACAGGAGAAAUCGUCUGGGACAAGGGAAGAGACUUCGCAACAGUCAGAAAGGUCCUGAGCAUGCCGC | |
| | AGGUCAACAUCGUCAAGAAGACAGAAGUCCAGACAGGAGGAUUCAGCAAGGAAAGCAUCCUGCCGAAGAGAAACAGCGACAAGCUG | |
| | AUCGCAAGAAAGAAGGACUGGGACCCGAAGAAGUACGGAGGAUUCGACAGCCCGACAGUCGCAUACAGCGUCCUGGUCGUCGCAAA | |
| | GGUCGAAAAGGGAAAGAGCAAGAAGCUGAAGAGCGUCAAGGAACUGCUGGGAAUCACAAUCAUGGAAAGAAGCAGCUUCGAAAAGA | |
| | ACCCGAUCGACUUCCUGGAAGCAAAGGGAUACAAGGAAGUCAAGAAGGACCUGAUCAUCAAGCUGCCGAAGUACAGCCUGUUCGAA | |
| | CUGGAAAACGGAAGAAAGAGAAUGCUGGCAAGCGCAGGAGAACUGCAGAAGGGAAACGAACUGGCACUGCCGAGCAAGUACGUCAA | |
| | CUUCCUGUACCUGGCAAGCCACUACGAAAAGCUGAAGGGAAGCCCGGAAGACAACGAACAGAAGCAGCUGUUCGUCGAACAGCACA | |
| | AGCACUACCUGGACGAAAUCAUCGAACAGAUCAGCGAAUUCAGCAAGAGAGUCAUCCUGGCAGACGCAAACCUGGACAAGGUCCUG | |
| | AGCGCAUACAACAAGCACAGAGACAAGCCGAUCAGAGAACAGGCAGAAAACAUCAUCCACCUGUUCACACUGACAAACCUGGGAGC | |
| | ACCGGCAGCAUUCAAGUACUUCGACACAACAAUCGACAGAAAGAGAUACACAAGCACAAAGGAAGUCCUGGACGCAACACUGAUCC | |
| | ACCAGAGCAUCACAGGACUGUACGAAACAAGAAUCGACCUGAGCCAGCUGGGAGGAGACGGAGGAGGAAGC | |
| Amino acid | MDKKYSIGLDIGTNSVGWAVITDEYKVPSKKFKVLGNTDRHSIKKNLIGALLFDSGETAEATRLKRTARRRYTRRKNRICYLQEIF | 222 |
| sequence of | SNEMAKVDDSFFHRLEESFLVEEDKKHERHPIFGNIVDEVAYHEKYPTIYHLRKKLVDSTDKADLRLIYLALAHMIKFRGHFLIEG | |
| Cas9 with | DLNPDNSDVDKLFIQLVQTYNQLFEENPINASGVDAKAILSARLSKSRRLENLIAQLPGEKKNGLFGNLIALSLGLTPNFKSNFDL | |
| two nuclear | AEDAKLQLSKDTYDDDLDNLLAQIGDQYADLFLAAKNLSDAILLSDILRVNTEITKAPLSASMIKRYDEHHQDLTLLKALVRQQLP | |
| localization | EKYKEIFFDQSKNGYAGYIDGGASQEEFYKFIKPILEKMDGTEELLVKLNREDLLRKQRTFDNGSIPHQIHLGELHAILRRQEDFY | |
| signals as | PFLKDNREKIEKILTFRIPYYVGPLARGNSRFAWMTRKSEETITPWNFEEVVDKGASAQSFIERMTNFDKNLPNEKVLPKHSLLYE | |
| the C- | YFTVYNELTKVKYVTEGMRKPAFLSGEQKKAIVDLLFKTNRKVTVKQLKEDYFKKIECFDSVEISGVEDRFNASLGTYHDLLKIIK | |
| terminal | DKDFLDNEENEDILEDIVLTLTLFEDREMIEERLKTYAHLFDDKVMKQLKRRRYTGWGRLSRKLINGIRDKQSGKTILDFLKSDGF | |
| amino acids | ANRNFMQLIHDDSLTFKEDIQKAQVSGQGDSLHEHIANLAGSPAIKKGILQTVKVVDELVKVMGRHKPENIVIEMARENQTTQKGQ | |
| | KNSRERMKRIEEGIKELGSQILKEHPVENTQLQNEKLYLYYLQNGRDMYVDQELDINRLSDYDVDHIVPQSFLKDDSIDNKVLTRS | |
| | DKNRGKSDNVPSEEVVKKMKNYWRQLLNAKLITQRKFDNLTKAERGGLSELDKAGFIKRQLVETRQITKHVAQILDSRMNTKYDEN | |
| | DKLIREVKVITLKSKLVSDFRKDFQFYKVREINNYHHAHDAYLNAVVGTALIKKYPKLESEFVYGDYKVYDVRKMIAKSEQEIGKA | |
| | TAKYFFYSNIMNFFKTEITLANGEIRKRPLIETNGETGEIVWDKGRDFATVRKVLSMPQVNIVKKTEVQTGGFSKESILPKRNSDK | |
| | LIARKKDWDPKKYGGFDSPTVAYSVLVVAKVEKGKSKKLKSVKELLGITIMERSSFEKNPIDFLEAKGYKEVKKDLIIKLPKYSLF | |
| | ELENGRKRMLASAGELQKGNELALPSKYVNFLYLASHYEKLKGSPEDNEQKQLFVEQHKHYLDEIIEQISEFSKRVILADANLDKV | |
| | LSAYNKHRDKPIREQAENIIHLFTLTNLGAPAAFKYFDTTIDRKRYTSTKEVLDATLIHQSITGLYETRIDLSQLGGD | |
| | GSGSPKKKRKVDGSPKKKRKVDSG | |
| Cas9 mRNA | AUGGACAAGAAGUACAGCAUCGGACUGGACAUCGGAACAAACAGCGUCGGAUGGGCAGUCAUCACAGACGAAUACAAGGUCCCGAG | 223 |
| ORF encoding | CAAGAAGUUCAAGGUCCUGGGAAACACAGACAGACACAGCAUCAAGAAGAACCUGAUCGGAGCACUGCUGUUCGACAGCGGAGAAA | |
| SEQ ID NO: | CAGCAGAAGCAACAAGACUGAAGAGAACAGCAAGAAGAAGAUACACAAGAAGAAAGAACAGAAUCUGCUACCUGCAGGAAAUCUUC | |
| 22 using | AGCAACGAAAUGGCAAAGGUCGACGACAGCUUCUUCCACAGACUGGAAGAAAGCUUCCUGGUCGAAGAAGACAAGAAGCACGAAAG | |
| minimal | ACACCCGAUCUUCGGAAACAUCGUCGACGAAGUCGCAUACCACGAAAAGUACCCGACAAUCUACCACCUGAGAAAGAAGCUGGUCG | |
| uridine | ACAGCACAGACAAGGCAGACCUGAGACUGAUCUACCUGGCACUGGCACACAUGAUCAAGUUCAGAGGACACUUCCUGAUCGAAGGA | |
| codons as | GACCUGAACCCGGACAACAGCGACGUCGACAAGCUGUUCAUCCAGCUGGUCCAGACAUACAACCAGCUGUUCGAAGAAAACCCGAU | |
| listed in | CAACGCAAGCGGAGUCGACGCAAAGGCAAUCCUGAGCGCAAGACUGAGCAAGAGCAGAAGACUGGAAAACCUGAUCGCACAGCUGC | |
| Table 3, | CGGGAGAAAAGAAGAACGGACUGUUCGGAAACCUGAUCGCACUGAGCCUGGGACUGACACCGAACUUCAAGAGCAACUUCGACCUG | |
| with start | GCAGAAGACGCAAAGCUGCAGCUGAGCAAGGACACAUACGACGACGACCUGGACAACCUGCUGGCACAGAUCGGAGACCAGUACGC | |
| and stop | AGACCUGUUCCUGGCAGCAAAGAACCUGAGCGACGCAAUCCUGCUGAGCGACAUCCUGAGAGUCAACACAGAAAUCACAAAGGCAC | |
| codons | CGCUGAGCGCAAGCAUGAUCAAGAGAUACGACGAACACCACCAGGACCUGACACUGCUGAAGGCACUGGUCAGACAGCAGCUGCCG | |
| | GAAAAGUACAAGGAAAUCUUCUUCGACCAGAGCAAGAACGGAUACGCAGGAUACAUCGACGGAGGAGCAAGCCAGGAAGAAUUCUA | |
| | CAAGUUCAUCAAGCCGAUCCUGGAAAAGAUGGACGGAACAGAAGAACUGCUGGUCAAGCUGAACAGAGAAGACCUGCUGAGAAAGC | |
| | AGAGAACAUUCGACAACGGAAGCAUCCCGCACCAGAUCCACCUGGGAGAACUGCACGCAAUCCUGAGAAGACAGGAAGACUUCUAC | |
| | CCGUUCCUGAAGGACAACAGAGAAAAGAUCGAAAAGAUCCUGACAUUCAGAAUCCCGUACUACGUCGGACCGCUGGCAAGAGGAAA | |
| | CAGCAGAUUCGCAUGGAUGACAAGAAAGAGCGAAGAAACAAUCACACCGUGGAACUUCGAAGAAGUCGUCGACAAGGGAGCAAGCG | |
| | CACAGAGCUUCAUCGAAAGAAUGACAAACUUCGACAAGAACCUGCCGAACGAAAAGGUCCUGCCGAAGCACAGCCUGCUGUACGAA | |
| | UACUUCACAGUCUACAACGAACUGACAAAGGUCAAGUACGUCACAGAAGGAAUGAGAAAGCCGGCAUUCCUGAGCGGAGAACAGAA | |
| | GAAGGCAAUCGUCGACCUGCUGUUCAAGACAAACAGAAAGGUCACAGUCAAGCAGCUGAAGGAAGACUACUUCAAGAAGAUCGAAU | |
| | GCUUCGACAGCGUCGAAAUCAGCGGAGUCGAAGACAGAUUCAACGCAAGCCUGGGAACAUACCACGACCUGCUGAAGAUCAUCAAG | |
| | GACAAGGACUUCCUGGACAACGAAGAAAACGAAGACAUCCUGGAAGACAUCGUCCUGACACUGACACUGUUCGAAGACAGAGAAAU | |
| | GAUCGAAGAAAGACUGAAGACAUACGCACACCUGUUCGACGACAAGGUCAUGAAGCAGCUGAAGAGAAGAAGAUACACAGGAUGGG | |
| | GAAGACUGAGCAGAAAGCUGAUCAACGGAAUCAGAGACAAGCAGAGCGGAAAGACAAUCCUGGACUUCCUGAAGAGCGACGGAUUC | |
| | GCAAACAGAAACUUCAUGCAGCUGAUCCACGACGACAGCCUGACAUUCAAGGAAGACAUCCAGAAGGCACAGGUCAGCGGACAGGG | |
| | AGACAGCCUGCACGAACACAUCGCAAACCUGGCAGGAAGCCCGGCAAUCAAGAAGGGAAUCCUGCAGACAGUCAAGGUCGUCGACG | |
| | AACUGGUCAAGGUCAUGGGAAGACACAAGCCGGAAAACAUCGUCAUCGAAAUGGCAAGAGAAAACCAGACAACACAGAAGGGACAG | |
| | AAGAACAGCAGAGAAAGAAUGAAGAGAAUCGAAGAAGGAAUCAAGGAACUGGGAAGCCAGAUCCUGAAGGAACACCCGGUCGAAAA | |
| | CACACAGCUGCAGAACGAAAAGCUGUACCUGUACUACCUGCAGAACGGAAGAGACAUGUACGUCGACCAGGAACUGGACAUCAACA | |
| | GACUGAGCGACUACGACGUCGACCACAUCGUCCCGCAGAGCUUCCUGAAGGACGACAGCAUCGACAACAAGGUCCUGACAAGAAGC | |
| | GACAAGAACAGAGGAAAGAGCGACAACGUCCCGAGCGAAGAAGUCGUCAAGAAGAUGAAGAACUACUGGAGACAGCUGCUGAACGC | |
| | AAAGCUGAUCACACAGAGAAAGUUCGACAACCUGACAAAGGCAGAGAGAGGAGGACUGAGCGAACUGGACAAGGCAGGAUUCAUCA | |
| | AGAGACAGCUGGUCGAAACAAGACAGAUCACAAAGCACGUCGCACAGAUCCUGGACAGCAGAAUGAACACAAAGUACGACGAAAAC | |
| | GACAAGCUGAUCAGAGAAGUCAAGGUCAUCACACUGAAGAGCAAGCUGGUCAGCGACUUCAGAAAGGACUUCCAGUUCUACAAGGU | |
| | CAGAGAAAUCAACAACUACCACCACGCACACGACGCAUACCUGAACGCAGUCGUCGGAACAGCACUGAUCAAGAAGUACCCGAAGC | |
| | UGGAAAGCGAAUUCGUCUACGGAGACUACAAGGUCUACGACGUCAGAAAGAUGAUCGCAAAGAGCGAACAGGAAAUCGGAAAGGCA | |
| | ACAGCAAAGUACUUCUUCUACAGCAACAUCAUGAACUUCUUCAAGACAGAAAUCACACUGGCAAACGGAGAAAUCAGAAAGAGACC | |
| | GCUGAUCGAAACAAACGGAGAAACAGGAGAAAUCGUCUGGGACAAGGGAAGAGACUUCGCAACAGUCAGAAAGGUCCUGAGCAUGC | |
| | CGCAGGUCAACAUCGUCAAGAAGACAGAAGUCCAGACAGGAGGAUUCAGCAAGGAAAGCAUCCUGCCGAAGAGAAACAGCGACAAG | |
| | CUGAUCGCAAGAAAGAAGGACUGGGACCCGAAGAAGUACGGAGGAUUCGACAGCCCGACAGUCGCAUACAGCGUCCUGGUCGUCGC | |
| | AAAGGUCGAAAAGGGAAAGAGCAAGAAGCUGAAGAGCGUCAAGGAACUGCUGGGAAUCACAAUCAUGGAAAGAAGCAGCUUCGAAA | |
| | AGAACCCGAUCGACUUCCUGGAAGCAAAGGGAUACAAGGAAGUCAAGAAGGACCUGAUCAUCAAGCUGCCGAAGUACAGCCUGUUC | |
| | GAACUGGAAAACGGAAGAAAGAGAAUGCUGGCAAGCGCAGGAGAACUGCAGAAGGGAAACGAACUGGCACUGCCGAGCAAGUACGU | |
| | CAACUUCCUGUACCUGGCAAGCCACUACGAAAAGCUGAAGGGAAGCCCGGAAGACAACGAACAGAAGCAGCUGUUCGUCGAACAGC | |
| | ACAAGCACUACCUGGACGAAAUCAUCGAACAGAUCAGCGAAUUCAGCAAGAGAGUCAUCCUGGCAGACGCAAACCUGGACAAGGUC | |
| | CUGAGCGCAUACAACAAGCACAGAGACAAGCCGAUCAGAGAACAGGCAGAAAACAUCAUCCACCUGUUCACACUGACAAACCUGGG | |
| | AGCACCGGCAGCAUUCAAGUACUUCGACACAACAAUCGACAGAAAGAGAUACACAAGCACAAAGGAAGUCCUGGACGCAACACUGA | |
| | UCCACCAGAGCAUCACAGGACUGUACGAAACAAGAAUCGACCUGAGCCAGCUGGGAGGAGACGGAAGCGGAAGCCCGAAGAAGAAG | |
| | AGAAAGGUCGACGGAAGCCCGAAGAAGAAGAGAAAGGUCGACAGCGGAUAG | |
| Cas9 coding | GACAAGAAGUACAGCAUCGGACUGGACAUCGGAACAAACAGCGUCGGAUGGGCAGUCAUCACAGACGAAUACAAGGUCCCGAGCAA | 224 |
| sequence | GAAGUUCAAGGUCCUGGGAAACACAGACAGACACAGCAUCAAGAAGAACCUGAUCGGAGCACUGCUGUUCGACAGCGGAGAAACAG | |
| encoding SEQ | CAGAAGCAACAAGACUGAAGAGAACAGCAAGAAGAAGAUACACAAGAAGAAAGAACAGAAUCUGCUACCUGCAGGAAAUCUUCAGC | |
| ID NO: 23 | AACGAAAUGGCAAAGGUCGACGACAGCUUCUUCCACAGACUGGAAGAAAGCUUCCUGGUCGAAGAAGACAAGAAGCACGAAAGACA | |
| using | CCCGAUCUUCGGAAACAUCGUCGACGAAGUCGCAUACCACGAAAAGUACCCGACAAUCUACCACCUGAGAAAGAAGCUGGUCGACA | |
| minimal | GCACAGACAAGGCAGACCUGAGACUGAUCUACCUGGCACUGGCACACAUGAUCAAGUUCAGAGGACACUUCCUGAUCGAAGGAGAC | |
| uridine | CUGAACCCGGACAACAGCGACGUCGACAAGCUGUUCAUCCAGCUGGUCCAGACAUACAACCAGCUGUUCGAAGAAAACCCGAUCAA | |
| codons as | CGCAAGCGGAGUCGACGCAAAGGCAAUCCUGAGCGCAAGACUGAGCAAGAGCAGAAGACUGGAAAACCUGAUCGCACAGCUGCCGG | |
| listed in | GAGAAAAGAAGAACGGACUGUUCGGAAACCUGAUCGCACUGAGCCUGGGACUGACACCGAACUUCAAGAGCAACUUCGACCUGGCA | |
| Table 3 (no | GAAGACGCAAAGCUGCAGCUGAGCAAGGACACAUACGACGACGACCUGGACAACCUGCUGGCACAGAUCGGAGACCAGUACGCAGA | |
| start or | CCUGUUCCUGGCAGCAAAGAACCUGAGCGACGCAAUCCUGCUGAGCGACAUCCUGAGAGUCAACACAGAAAUCACAAAGGCACCGC | |
| stop codons; | UGAGCGCAAGCAUGAUCAAGAGAUACGACGAACACCACCAGGACCUGACACUGCUGAAGGCACUGGUCAGACAGCAGCUGCCGGAA | |
| suitable for | AAGUACAAGGAAAUCUUCUUCGACCAGAGCAAGAACGGAUACGCAGGAUACAUCGACGGAGGAGCAAGCCAGGAAGAAUUCUACAA | |
| inclusion in | GUUCAUCAAGCCGAUCCUGGAAAAGAUGGACGGAAGAGAAGAACUGCUGGUCAAGCUGAACAGAGAAGACCUGCUGAGAAAGCAGA | |
| fusion | GAACAUUCGACAACGGAAGCAUCCCGCACCAGAUCCACCUGGGAGAACUGCACGCAAUCCUGAGAAGACAGGAAGACUUCUACCCG | |
| protein | UUCCUGAAGGACAACAGAGAAAAGAUCGAAAAGAUCCUGACAUUCAGAAUCCCGUACUACGUCGGACCGCUGGCAAGAGGAAACAG | |
| coding | CAGAUUCGCAUGGAUGACAAGAAAGAGCGAAGAAACAAUCACACCGUGGAACUUCGAAGAAGUCGUCGACAAGGGAGCAAGCGCAC | |
| sequence) | AGAGCUUCAUCGAAAGAAUGACAAACUUCGACAAGAACCUGCCGAACGAAAAGGUCCUGCCGAAGCACAGCCUGCUGUACGAAUAC | |
| | UUCACAGUCUACAACGAACUGACAAAGGUCAAGUACGUCACAGAAGGAAUGAGAAAGCCGGCAUUCCUGAGCGGAGAACAGAAGAA | |
| | GGCAAUCGUCGACCUGCUGUUCAAGACAAACAGAAAGGUCACAGUCAAGCAGCUGAAGGAAGACUACUUCAAGAAGAUCGAAUGCU | |
| | UCGACAGCGUCGAAAUCAGCGGAGUCGAAGACAGAUUCAACGCAAGCCUGGGAACAUACCACGACCUGCUGAAGAUCAUCAAGGAC | |
| | AAGGACUUCCUGGACAACGAAGAAAACGAAGACAUCCUGGAAGACAUCGUCCUGACACUGACACUGUUCGAAGACAGAGAAAUGAU | |
| | CGAAGAAAGACUGAAGACAUACGCACACCUGUUCGACGACAAGGUCAUGAAGCAGCUGAAGAGAAGAAGAUACACAGGAUGGGGAA | |
| | GACUGAGCAGAAAGCUGAUCAACGGAAUCAGAGACAAGCAGAGCGGAAAGACAAUCCUGGACUUCCUGAAGAGCGACGGAUUCGCA | |
| | AACAGAAACUUCAUGCAGCUGAUCCACGACGACAGCCUGACAUUCAAGGAAGACAUCCAGAAGGCACAGGUCAGCGGACAGGGAGA | |
| | CAGCCUGCACGAACACAUCGCAAACCUGGCAGGAAGCCCGGCAAUCAAGAAGGGAAUCCUGCAGACAGUCAAGGUCGUCGACGAAC | |
| | UGGUCAAGGUCAUGGGAAGACACAAGCCGGAAAACAUCGUCAUCGAAAUGGCAAGAGAAAACCAGACAACACAGAAGGGACAGAAG | |
| | AACAGCAGAGAAAGAAUGAAGAGAAUCGAAGAAGGAAUCAAGGAACUGGGAAGCCAGAUCCUGAAGGAACACCCGGUCGAAAACAC | |
| | ACAGCUGCAGAACGAAAAGCUGUACCUGUACUACCUGCAGAACGGAAGAGACAUGUACGUCGACCAGGAACUGGACAUCAACAGAC | |
| | UGAGCGACUACGACGUCGACCACAUCGUCCCGCAGAGCUUCCUGAAGGACGACAGCAUCGACAACAAGGUCCUGACAAGAAGCGAC | |
| | AAGAACAGAGGAAAGAGCGACAACGUCCCGAGCGAAGAAGUCGUCAAGAAGAUGAAGAACUACUGGAGACAGCUGCUGAACGCAAA | |
| | GCUGAUCACACAGAGAAAGUUCGACAACCUGACAAAGGCAGAGAGAGGAGGACUGAGCGAACUGGACAAGGCAGGAUUCAUCAAGA | |
| | GACAGCUGGUCGAAACAAGACAGAUCACAAAGCACGUCGCACAGAUCCUGGACAGCAGAAUGAACACAAAGUACGACGAAAACGAC | |
| | AAGCUGAUCAGAGAAGUCAAGGUCAUCACACUGAAGAGCAAGCUGGUCAGCGACUUCAGAAAGGACUUCCAGUUCUACAAGGUCAG | |
| | AGAAAUCAACAACUACCACCACGCACACGACGCAUACCUGAACGCAGUCGUCGGAACAGCACUGAUCAAGAAGUACCCGAAGCUGG | |
| | AAAGCGAAUUCGUCUACGGAGACUACAAGGUCUACGACGUCAGAAAGAUGAUCGCAAAGAGCGAACAGGAAAUCGGAAAGGCAACA | |
| | GCAAAGUACUUCUUCUACAGCAACAUCAUGAACUUCUUCAAGACAGAAAUCACACUGGCAAACGGAGAAAUCAGAAAGAGACCGCU | |
| | GAUCGAAACAAACGGAGAAACAGGAGAAAUCGUCUGGGACAAGGGAAGAGACUUCGCAACAGUCAGAAAGGUCCUGAGCAUGCCGC | |
| | AGGUCAACAUCGUCAAGAAGACAGAAGUCCAGACAGGAGGAUUCAGCAAGGAAAGCAUCCUGCCGAAGAGAAACAGCGACAAGCUG | |
| | AUCGCAAGAAAGAAGGACUGGGACCCGAAGAAGUACGGAGGAUUCGACAGCCCGACAGUCGCAUACAGCGUCCUGGUCGUCGCAAA | |
| | GGUCGAAAAGGGAAAGAGCAAGAAGCUGAAGAGCGUCAAGGAACUGCUGGGAAUCACAAUCAUGGAAAGAAGCAGCUUCGAAAAGA | |
| | ACCCGAUCGACUUCCUGGAAGCAAAGGGAUACAAGGAAGUCAAGAAGGACCUGAUCAUCAAGCUGCCGAAGUACAGCCUGUUCGAA | |
| | CUGGAAAACGGAAGAAAGAGAAUGCUGGCAAGCGCAGGAGAACUGCAGAAGGGAAACGAACUGGCACUGCCGAGCAAGUACGUCAA | |
| | CUUCCUGUACCUGGCAAGCCACUACGAAAAGCUGAAGGGAAGCCCGGAAGACAACGAACAGAAGCAGCUGUUCGUCGAACAGCACA | |
| | AGCACUACCUGGACGAAAUCAUCGAACAGAUCAGCGAAUUCAGCAAGAGAGUCAUCCUGGCAGACGCAAACCUGGACAAGGUCCUG | |
| | AGCGCAUACAACAAGCACAGAGACAAGCCGAUCAGAGAACAGGCAGAAAACAUCAUCCACCUGUUCACACUGACAAACCUGGGAGC | |
| | ACCGGCAGCAUUCAAGUACUUCGACACAACAAUCGACAGAAAGAGAUACACAAGCACAAAGGAAGUCCUGGACGCAACACUGAUCC | |
| | ACCAGAGCAUCACAGGACUGUACGAAACAAGAAUCGACCUGAGCCAGCUGGGAGGAGACGGAAGCGGAAGCCCGAAGAAGAAGAGA | |
| | AAGGUCGACGGAAGCCCGAAGAAGAAGAGAAAGGUCGACAGCGGA | |
| Amino acid | MDKKYSIGLAIGTNSVGWAVITDEYKVPSKKFKVLGNTDRHSIKKNLIGALLFDSGETAEATRLKRTARRRYTRRKNRICYLQEIF | 225 |
| sequence of | SNEMAKVDDSFFHRLEESFLVEEDKKHERHPIFGNIVDEVAYHEKYPTIYHLRKKLVDSTDKADLRLIYLALAHMIKFRGHFLIEG | |
| Cas9 nickase | DLNPDNSDVDKLFIQLVQTYNQLFEENPINASGVDAKAILSARLSKSRRLENLIAQLPGEKKNGLFGNLIALSLGLTPNFKSNFDL | |
| with two | AEDAKLQLSKDTYDDDLDNLLAQIGDQYADLFLAAKNLSDAILLSDILRVNTEITKAPLSASMIKRYDEHHQDLTLLKALVRQQLP | |
| nuclear | EKYKEIFFDQSKNGYAGYIDGGASQEEFYKFIKPILEKMDGTEELLVKLNREDLLRKQRTFDNGSIPHQIHLGELHAILRRQEDFY | |
| localization | PFLKDNREKIEKILTFRIPYYVGPLARGNSRFAWMTRKSEETITPWNFEEVVDKGASAQSFIERMTNFDKNLPNEKVLPKHSLLYE | |
| signals as | YFTVYNELTKVKYVTEGMRKPAFLSGEQKKAIVDLLFKTNRKVTVKQLKEDYFKKIECFDSVEISGVEDRFNASLGTYHDLLKIIK | |
| the C- | DKDFLDNEENEDILEDIVLTLTLFEDREMIEERLKTYAHLFDDKVMKQLKRRRYTGWGRLSRKLINGIRDKQSGKTILDFLKSDGF | |
| terminal | ANRNFMQLIHDDSLTFKEDIQKAQVSGQGDSLHEHIANLAGSPAIKKGILQTVKVVDELVKVMGRHKPENIVIEMARENQTTQKGQ | |
| amino acids | KNSRERMKRIEEGIKELGSQILKEHPVENTQLQNEKLYLYYLQNGRDMYVDQELDINRLSDYDVDHIVPQSFLKDDSIDNKVLTRS | |
| | DKNRGKSDNVPSEEVVKKMKNYWRQLLNAKLITQRKFDNLTKAERGGLSELDKAGFIKRQLVETRQITKHVAQILDSRMNTKYDEN | |
| | DKLIREVKVITLKSKLVSDFRKDFQFYKVREINNYHHAHDAYLNAVVGTALIKKYPKLESEFVYGDYKVYDVRKMIAKSEQEIGKA | |
| | TAKYFFYSNIMNFFKTEITLANGEIRKRPLIETNGETGEIVWDKGRDFATVRKVLSMPQVNIVKKTEVQTGGFSKESILPKRNSDK | |
| | LIARKKDWDPKKYGGFDSPTVAYSVLVVAKVEKGKSKKLKSVKELLGITIMERSSFEKNPIDFLEAKGYKEVKKDLIIKLPKYSLF | |
| | ELENGRKRMLASAGELQKGNELALPSKYVNFLYLASHYEKLKGSPEDNEQKQLFVEQHKHYLDEIIEQISEFSKRVILADANLDKV | |
| | LSAYNKHRDKPIREQAENIIHLFTLTNLGAPAAFKYFDTTIDRKRYTSTKEVLDATLIHQSITGLYETRIDLSQLGGDGSGSPKKK | |
| | RKVDGSPKKKRKVDSG | |
| Cas9 nickase | AUGGACAAGAAGUACAGCAUCGGACUGGCAAUCGGAACAAACAGCGUCGGAUGGGCAGUCAUCACAGACGAAUACAAGGUCCCGAG | 226 |
| mRNA ORF | CAAGAAGUUCAAGGUCCUGGGAAACACAGACAGACACAGCAUCAAGAAGAACCUGAUCGGAGCACUGCUGUUCGACAGCGGAGAAA | |
| encoding SEQ | CAGCAGAAGCAACAAGACUGAAGAGAACAGCAAGAAGAAGAUACACAAGAAGAAAGAACAGAAUCUGCUACCUGCAGGAAAUCUUC | |
| ID NO: 25 | AGCAACGAAAUGGCAAAGGUCGACGACAGCUUCUUCCACAGACUGGAAGAAAGCUUCCUGGUCGAAGAAGACAAGAAGCACGAAAG | |
| using | ACACCCGAUCUUCGGAAACAUCGUCGACGAAGUCGCAUACCACGAAAAGUACCCGACAAUCUACCACCUGAGAAAGAAGCUGGUCG | |
| minimal | ACAGCACAGACAAGGCAGACCUGAGACUGAUCUACCUGGCACUGGCACACAUGAUCAAGUUCAGAGGACACUUCCUGAUCGAAGGA | |
| uridine | GACCUGAACCCGGACAACAGCGACGUCGACAAGCUGUUCAUCCAGCUGGUCCAGACAUACAACCAGCUGUUCGAAGAAAACCCGAU | |
| codons as | CAACGCAAGCGGAGUCGACGCAAAGGCAAUCCUGAGCGCAAGACUGAGCAAGAGCAGAAGACUGGAAAACCUGAUCGCACAGCUGC | |
| listed in | CGGGAGAAAAGAAGAACGGACUGUUCGGAAACCUGAUCGCACUGAGCCUGGGACUGACACCGAACUUCAAGAGCAACUUCGACCUG | |
| Table 3, | GCAGAAGACGCAAAGCUGCAGCUGAGCAAGGACACAUACGACGACGACCUGGACAACCUGCUGGCACAGAUCGGAGACCAGUACGC | |
| with start | AGACCUGUUCCUGGCAGCAAAGAACCUGAGCGACGCAAUCCUGCUGAGCGACAUCCUGAGAGUCAACACAGAAAUCACAAAGGCAC | |
| and stop | CGCUGAGCGCAAGCAUGAUCAAGAGAUACGACGAACACCACCAGGACCUGACACUGCUGAAGGCACUGGUCAGACAGCAGCUGCCG | |
| codons | GAAAAGUACAAGGAAAUCUUCUUCGACCAGAGCAAGAACGGAUACGCAGGAUACAUCGACGGAGGAGCAAGCCAGGAAGAAUUCUA | |
| | CAAGUUCAUCAAGCCGAUCCUGGAAAAGAUGGACGGAACAGAAGAACUGCUGGUCAAGCUGAACAGAGAAGACCUGCUGAGAAAGC | |
| | AGAGAACAUUCGACAACGGAAGCAUCCCGCACCAGAUCCACCUGGGAGAACUGCACGCAAUCCUGAGAAGACAGGAAGACUUCUAC | |
| | CCGUUCCUGAAGGACAACAGAGAAAAGAUCGAAAAGAUCCUGACAUUCAGAAUCCCGUACUACGUCGGACCGCUGGCAAGAGGAAA | |
| | CAGCAGAUUCGCAUGGAUGACAAGAAAGAGCGAAGAAACAAUCACACCGUGGAACUUCGAAGAAGUCGUCGACAAGGGAGCAAGCG | |
| | CACAGAGCUUCAUCGAAAGAAUGACAAACUUCGACAAGAACCUGCCGAACGAAAAGGUCCUGCCGAAGCACAGCCUGCUGUACGAA | |
| | UACUUCACAGUCUACAACGAACUGACAAAGGUCAAGUACGUCACAGAAGGAAUGAGAAAGCCGGCAUUCCUGAGCGGAGAACAGAA | |
| | GAAGGCAAUCGUCGACCUGCUGUUCAAGACAAACAGAAAGGUCACAGUCAAGCAGCUGAAGGAAGACUACUUCAAGAAGAUCGAAU | |
| | GCUUCGACAGCGUCGAAAUCAGCGGAGUCGAAGACAGAUUCAACGCAAGCCUGGGAACAUACCACGACCUGCUGAAGAUCAUCAAG | |
| | GACAAGGACUUCCUGGACAACGAAGAAAACGAAGACAUCCUGGAAGACAUCGUCCUGACACUGACACUGUUCGAAGACAGAGAAAU | |
| | GAUCGAAGAAAGACUGAAGACAUACGCACACCUGUUCGACGACAAGGUCAUGAAGCAGCUGAAGAGAAGAAGAUACACAGGAUGGG | |
| | GAAGACUGAGCAGAAAGCUGAUCAACGGAAUCAGAGACAAGCAGAGCGGAAAGACAAUCCUGGACUUCCUGAAGAGCGACGGAUUC | |
| | GCAAACAGAAACUUCAUGCAGCUGAUCCACGACGACAGCCUGACAUUCAAGGAAGACAUCCAGAAGGCACAGGUCAGCGGACAGGG | |
| | AGACAGCCUGCACGAACACAUCGCAAACCUGGCAGGAAGCCCGGCAAUCAAGAAGGGAAUCCUGCAGACAGUCAAGGUCGUCGACG | |
| | AACUGGUCAAGGUCAUGGGAAGACACAAGCCGGAAAACAUCGUCAUCGAAAUGGCAAGAGAAAACCAGACAACACAGAAGGGACAG | |
| | AAGAACAGCAGAGAAAGAAUGAAGAGAAUCGAAGAAGGAAUCAAGGAACUGGGAAGCCAGAUCCUGAAGGAACACCCGGUCGAAAA | |
| | CACACAGCUGCAGAACGAAAAGCUGUACCUGUACUACCUGCAGAACGGAAGAGACAUGUACGUCGACCAGGAACUGGACAUCAACA | |
| | GACUGAGCGACUACGACGUCGACCACAUCGUCCCGCAGAGCUUCCUGAAGGACGACAGCAUCGACAACAAGGUCCUGACAAGAAGC | |
| | GACAAGAACAGAGGAAAGAGCGACAACGUCCCGAGCGAAGAAGUCGUCAAGAAGAUGAAGAACUACUGGAGACAGCUGCUGAACGC | |
| | AAAGCUGAUCACACAGAGAAAGUUCGACAACCUGACAAAGGCAGAGAGAGGAGGACUGAGCGAACUGGACAAGGCAGGAUUCAUCA | |
| | AGAGACAGCUGGUCGAAACAAGACAGAUCACAAAGCACGUCGCACAGAUCCUGGACAGCAGAAUGAACACAAAGUACGACGAAAAC | |
| | GACAAGCUGAUCAGAGAAGUCAAGGUCAUCACACUGAAGAGCAAGCUGGUCAGCGACUUCAGAAAGGACUUCCAGUUCUACAAGGU | |
| | CAGAGAAAUCAACAACUACCACCACGCACACGACGCAUACCUGAACGCAGUCGUCGGAACAGCACUGAUCAAGAAGUACCCGAAGC | |
| | UGGAAAGCGAAUUCGUCUACGGAGACUACAAGGUCUACGACGUCAGAAAGAUGAUCGCAAAGAGCGAACAGGAAAUCGGAAAGGCA | |
| | ACAGCAAAGUACUUCUUCUACAGCAACAUCAUGAACUUCUUCAAGACAGAAAUCACACUGGCAAACGGAGAAAUCAGAAAGAGACC | |
| | GCUGAUCGAAACAAACGGAGAAACAGGAGAAAUCGUCUGGGACAAGGGAAGAGACUUCGCAACAGUCAGAAAGGUCCUGAGCAUGC | |
| | CGCAGGUCAACAUCGUCAAGAAGACAGAAGUCCAGACAGGAGGAUUCAGCAAGGAAAGCAUCCUGCCGAAGAGAAACAGCGACAAG | |
| | CUGAUCGCAAGAAAGAAGGACUGGGACCCGAAGAAGUACGGAGGAUUCGACAGCCCGACAGUCGCAUACAGCGUCCUGGUCGUCGC | |
| | AAAGGUCGAAAAGGGAAAGAGCAAGAAGCUGAAGAGCGUCAAGGAACUGCUGGGAAUCACAAUCAUGGAAAGAAGCAGCUUCGAAA | |
| | AGAACCCGAUCGACUUCCUGGAAGCAAAGGGAUACAAGGAAGUCAAGAAGGACCUGAUCAUCAAGCUGCCGAAGUACAGCCUGUUC | |
| | GAACUGGAAAACGGAAGAAAGAGAAUGCUGGCAAGCGCAGGAGAACUGCAGAAGGGAAACGAACUGGCACUGCCGAGCAAGUACGU | |
| | CAACUUCCUGUACCUGGCAAGCCACUACGAAAAGCUGAAGGGAAGCCCGGAAGACAACGAACAGAAGCAGCUGUUCGUCGAACAGC | |
| | ACAAGCACUACCUGGACGAAAUCAUCGAACAGAUCAGCGAAUUCAGCAAGAGAGUCAUCCUGGCAGACGCAAACCUGGACAAGGUC | |
| | CUGAGCGCAUACAACAAGCACAGAGACAAGCCGAUCAGAGAACAGGCAGAAAACAUCAUCCACCUGUUCACACUGACAAACCUGGG | |
| | AGCACCGGCAGCAUUCAAGUACUUCGACACAACAAUCGACAGAAAGAGAUACACAAGCACAAAGGAAGUCCUGGACGCAACACUGA | |
| | UCCACCAGAGCAUCACAGGACUGUACGAAACAAGAAUCGACCUGAGCCAGCUGGGAGGAGACGGAAGCGGAAGCCCGAAGAAGAAG | |
| | AGAAAGGUCGACGGAAGCCCGAAGAAGAAGAGAAAGGUCGACAGCGGAUAG | |
| Cas9 nickase | GACAAGAAGUACAGCAUCGGACUGGCAAUCGGAACAAACAGCGUCGGAUGGGCAGUCAUCACAGACGAAUACAAGGUCCCGAGCAA | 227 |
| coding | GAAGUUCAAGGUCCUGGGAAACACAGACAGACACAGCAUCAAGAAGAACCUGAUCGGAGCACUGCUGUUCGACAGCGGAGAAACAG | |
| sequence | CAGAAGCAACAAGACUGAAGAGAACAGCAAGAAGAAGAUACACAAGAAGAAAGAACAGAAUCUGCUACCUGCAGGAAAUCUUCAGC | |
| encoding SEQ | AACGAAAUGGCAAAGGUCGACGACAGCUUCUUCCACAGACUGGAAGAAAGCUUCCUGGUCGAAGAAGACAAGAAGCACGAAAGACA | |
| ID NO: 25 | CCCGAUCUUCGGAAACAUCGUCGACGAAGUCGCAUACCACGAAAAGUACCCGACAAUCUACCACCUGAGAAAGAAGCUGGUCGACA | |
| using | GCACAGACAAGGCAGACCUGAGACUGAUCUACCUGGCACUGGCACACAUGAUCAAGUUCAGAGGACACUUCCUGAUCGAAGGAGAC | |
| minimal | CUGAACCCGGACAACAGCGACGUCGACAAGCUGUUCAUCCAGCUGGUCCAGACAUACAACCAGCUGUUCGAAGAAAACCCGAUCAA | |
| uridine | CGCAAGCGGAGUCGACGCAAAGGCAAUCCUGAGCGCAAGACUGAGCAAGAGCAGAAGACUGGAAAACCUGAUCGCACAGCUGCCGG | |
| codons as | GAGAAAAGAAGAACGGACUGUUCGGAAACCUGAUCGCACUGAGCCUGGGACUGACACCGAACUUCAAGAGCAACUUCGACCUGGCA | |
| listed in | GAAGACGCAAAGCUGCAGCUGAGCAAGGACACAUACGACGACGACCUGGACAACCUGCUGGCACAGAUCGGAGACCAGUACGCAGA | |
| Table 3 (no | CCUGUUCCUGGCAGCAAAGAACCUGAGCGACGCAAUCCUGCUGAGCGACAUCCUGAGAGUCAACACAGAAAUCACAAAGGCACCGC | |
| start or | UGAGCGCAAGCAUGAUCAAGAGAUACGACGAACACCACCAGGACCUGACACUGCUGAAGGCACUGGUCAGACAGCAGCUGCCGGAA | |
| stop codons; | AAGUACAAGGAAAUCUUCUUCGACCAGAGCAAGAACGGAUACGCAGGAUACAUCGACGGAGGAGCAAGCCAGGAAGAAUUCUACAA | |
| suitable for | GUUCAUCAAGCCGAUCCUGGAAAAGAUGGACGGAACAGAAGAACUGCUGGUCAAGCUGAACAGAGAAGACCUGCUGAGAAAGCAGA | |
| inclusion in | GAACAUUCGACAACGGAAGCAUCCCGCACCAGAUCCACCUGGGAGAACUGCACGCAAUCCUGAGAAGACAGGAAGACUUCUACCCG | |
| fusion | UUCCUGAAGGACAACAGAGAAAAGAUCGAAAAGAUCCUGACAUUCAGAAUCCCGUACUACGUCGGACCGCUGGCAAGAGGAAACAG | |
| protein | CAGAUUCGCAUGGAUGACAAGAAAGAGCGAAGAAACAAUCACACCGUGGAACUUCGAAGAAGUCGUCGACAAGGGAGCAAGCGCAC | |
| coding | AGAGCUUCAUCGAAAGAAUGACAAACUUCGACAAGAACCUGCCGAACGAAAAGGUCCUGCCGAAGCACAGCCUGCUGUACGAAUAC | |
| sequence) | UUCACAGUCUACAACGAACUGACAAAGGUCAAGUACGUCACAGAAGGAAUGAGAAAGCCGGCAUUCCUGAGCGGAGAACAGAAGAA | |
| | GGCAAUCGUCGACCUGCUGUUCAAGACAAACAGAAAGGUCACAGUCAAGCAGCUGAAGGAAGACUACUUCAAGAAGAUCGAAUGCU | |
| | UCGACAGCGUCGAAAUCAGCGGAGUCGAAGACAGAUUCAACGCAAGCCUGGGAACAUACCACGACCUGCUGAAGAUCAUCAAGGAC | |
| | AAGGACUUCCUGGACAACGAAGAAAACGAAGACAUCCUGGAAGACAUCGUCCUGACACUGACACUGUUCGAAGACAGAGAAAUGAU | |
| | CGAAGAAAGACUGAAGACAUACGCACACCUGUUCGACGACAAGGUCAUGAAGCAGCUGAAGAGAAGAAGAUACACAGGAUGGGGAA | |
| | GACUGAGCAGAAAGCUGAUCAACGGAAUCAGAGACAAGCAGAGCGGAAAGACAAUCCUGGACUUCCUGAAGAGCGACGGAUUCGCA | |
| | AACAGAAACUUCAUGCAGCUGAUCCACGACGACAGCCUGACAUUCAAGGAAGACAUCCAGAAGGCACAGGUCAGCGGACAGGGAGA | |
| | CAGCCUGCACGAACACAUCGCAAACCUGGCAGGAAGCCCGGCAAUCAAGAAGGGAAUCCUGCAGACAGUCAAGGUCGUCGACGAAC | |
| | UGGUCAAGGUCAUGGGAAGACACAAGCCGGAAAACAUCGUCAUCGAAAUGGCAAGAGAAAACCAGACAACACAGAAGGGACAGAAG | |
| | AACAGCAGAGAAAGAAUGAAGAGAAUCGAAGAAGGAAUCAAGGAACUGGGAAGCCAGAUCCUGAAGGAACACCCGGUCGAAAACAC | |
| | ACAGCUGCAGAACGAAAAGCUGUACCUGUACUACCUGCAGAACGGAAGAGACAUGUACGUCGACCAGGAACUGGACAUCAACAGAC | |
| | UGAGCGACUACGACGUCGACCACAUCGUCCCGCAGAGCUUCCUGAAGGACGACAGCAUCGACAACAAGGUCCUGACAAGAAGCGAC | |
| | AAGAACAGAGGAAAGAGCGACAACGUCCCGAGCGAAGAAGUCGUCAAGAAGAUGAAGAACUACUGGAGACAGCUGCUGAACGCAAA | |
| | GCUGAUCACACAGAGAAAGUUCGACAACCUGACAAAGGCAGAGAGAGGAGGACUGAGCGAACUGGACAAGGCAGGAUUCAUCAAGA | |
| | GACAGCUGGUCGAAACAAGACAGAUCACAAAGCACGUCGCACAGAUCCUGGACAGCAGAAUGAACACAAAGUACGACGAAAACGAC | |
| | AAGCUGAUCAGAGAAGUCAAGGUCAUCACACUGAAGAGCAAGCUGGUCAGCGACUUCAGAAAGGACUUCCAGUUCUACAAGGUCAG | |
| | AGAAAUCAACAACUACCACCACGCACACGACGCAUACCUGAACGCAGUCGUCGGAACAGCACUGAUCAAGAAGUACCCGAAGCUGG | |
| | AAAGCGAAUUCGUCUACGGAGACUACAAGGUCUACGACGUCAGAAAGAUGAUCGCAAAGAGCGAACAGGAAAUCGGAAAGGCAACA | |
| | GCAAAGUACUUCUUCUACAGCAACAUCAUGAACUUCUUCAAGACAGAAAUCACACUGGCAAACGGAGAAAUCAGAAAGAGACCGCU | |
| | GAUCGAAACAAACGGAGAAACAGGAGAAAUCGUCUGGGACAAGGGAAGAGACUUCGCAACAGUCAGAAAGGUCCUGAGCAUGCCGC | |
| | AGGUCAACAUCGUCAAGAAGACAGAAGUCCAGACAGGAGGAUUCAGCAAGGAAAGCAUCCUGCCGAAGAGAAACAGCGACAAGCUG | |
| | AUCGCAAGAAAGAAGGACUGGGACCCGAAGAAGUACGGAGGAUUCGACAGCCCGACAGUCGCAUACAGCGUCCUGGUCGUCGCAAA | |
| | GGUCGAAAAGGGAAAGAGCAAGAAGCUGAAGAGCGUCAAGGAACUGCUGGGAAUCACAAUCAUGGAAAGAAGCAGCUUCGAAAAGA | |
| | ACCCGAUCGACUUCCUGGAAGCAAAGGGAUACAAGGAAGUCAAGAAGGACCUGAUCAUCAAGCUGCCGAAGUACAGCCUGUUCGAA | |
| | CUGGAAAACGGAAGAAAGAGAAUGCUGGCAAGCGCAGGAGAACUGCAGAAGGGAAACGAACUGGCACUGCCGAGCAAGUACGUCAA | |
| | CUUCCUGUACCUGGCAAGCCACUACGAAAAGCUGAAGGGAAGCCCGGAAGACAACGAACAGAAGCAGCUGUUCGUCGAACAGCACA | |
| | AGCACUACCUGGACGAAAUCAUCGAACAGAUCAGCGAAUUCAGCAAGAGAGUCAUCCUGGCAGACGCAAACCUGGACAAGGUCCUG | |
| | AGCGCAUACAACAAGCACAGAGACAAGCCGAUCAGAGAACAGGCAGAAAACAUCAUCCACCUGUUCACACUGACAAACCUGGGAGC | |
| | ACCGGCAGCAUUCAAGUACUUCGACACAACAAUCGACAGAAAGAGAUACACAAGCACAAAGGAAGUCCUGGACGCAACACUGAUCC | |
| | ACCAGAGCAUCACAGGACUGUACGAAACAAGAAUCGACCUGAGCCAGCUGGGAGGAGAC | |
| | GGAAGCGGAAGCCCGAAGAAGAAGAGAAAGGUCGACGGAAGCCCGAAGAAGAAGAGAAAGGUCGACAGCGGA | |
| Amino acid | MDKKYSIGLAIGTNSVGWAVITDEYKVPSKKFKVLGNTDRHSIKKNLIGALLFDSGETAEATRLKRTARRRYTRRKNRICYLQEIF | 228 |
| sequence of | SNEMAKVDDSFFHRLEESFLVEEDKKHERHPIFGNIVDEVAYHEKYPTIYHLRKKLVDSTDKADLRLIYLALAHMIKFRGHFLIEG | |
| dCas9 with | DLNPDNSDVDKLFIQLVQTYNQLFEENPINASGVDAKAILSARLSKSRRLENLIAQLPGEKKNGLFGNLIALSLGLTPNFKSNFDL | |
| two nuclear | AEDAKLQLSKDTYDDDLDNLLAQIGDQYADLFLAAKNLSDAILLSDILRVNTEITKAPLSASMIKRYDEHHQDLTLLKALVRQQLP | |
| localization | EKYKEIFFDQSKNGYAGYIDGGASQEEFYKFIKPILEKMDGTEELLVKLNREDLLRKQRTFDNGSIPHQIHLGELHAILRRQEDFY | |
| signals as | PFLKDNREKIEKILTFRIPYYVGPLARGNSRFAWMTRKSEETITPWNFEEVVDKGASAQSFIERMTNFDKNLPNEKVLPKHSLLYE | |
| the C-terminal | YFTVYNELTKVKYVTEGMRKPAFLSGEQKKAIVDLLFKTNRKVTVKQLKEDYFKKIECFDSVEISGVEDRFNASLGTYHDLLKIIK | |
| amino acids | DKDFLDNEENEDILEDIVLTLTLFEDREMIEERLKTYAHLFDDKVMKQLKRRRYTGWGRLSRKLINGIRDKQSGKTILDFLKSDGF | |
| | ANRNFMQLIHDDSLTFKEDIQKAQVSGQGDSLHEHIANLAGSPAIKKGILQTVKVVDELVKVMGRHKPENIVIEMARENQTTQKGQ | |
| | KNSRERMKRIEEGIKELGSQILKEHPVENTQLQNEKLYLYYLQNGRDMYVDQELDINRLSDYDVDAIVPQSFLKDDSIDNKVLTRS | |
| | DKNRGKSDNVPSEEVVKKMKNYWRQLLNAKLITQRKFDNLTKAERGGLSELDKAGFIKRQLVETRQITKHVAQILDSRMNTKYDEN | |
| | DKLIREVKVITLKSKLVSDFRKDFQFYKVREINNYHHAHDAYLNAVVGTALIKKYPKLESEFVYGDYKVYDVRKMIAKSEQEIGKA | |
| | TAKYFFYSNIMNFFKTEITLANGEIRKRPLIETNGETGEIVWDKGRDFATVRKVLSMPQVNIVKKTEVQTGGFSKESILPKRNSDK | |
| | LIARKKDWDPKKYGGFDSPTVAYSVLVVAKVEKGKSKKLKSVKELLGITIMERSSFEKNPIDFLEAKGYKEVKKDLIIKLPKYSLF | |
| | ELENGRKRMLASAGELQKGNELALPSKYVNFLYLASHYEKLKGSPEDNEQKQLFVEQHKHYLDEIIEQISEFSKRVILADANLDKV | |
| | LSAYNKHRDKPIREQAENIIHLFTLTNLGAPAAFKYFDTTIDRKRYTSTKEVLDATLIHQSITGLYETRIDLSQLGGDGSGSPKKK | |
| | RKVDGSPKKKRKVDSG | |
| dCas9 mRNA | AUGGACAAGAAGUACAGCAUCGGACUGGCAAUCGGAACAAACAGCGUCGGAUGGGCAGUCAUCACAGACGAAUACAAGGUCCCGAG | 229 |
| ORF encoding | CAAGAAGUUCAAGGUCCUGGGAAACACAGACAGACACAGCAUCAAGAAGAACCUGAUCGGAGCACUGCUGUUCGACAGCGGAGAAA | |
| SEQ ID NO: | CAGCAGAAGCAACAAGACUGAAGAGAACAGCAAGAAGAAGAUACACAAGAAGAAAGAACAGAAUCUGCUACCUGCAGGAAAUCUUC | |
| 28 using | AGCAACGAAAUGGCAAAGGUCGACGACAGCUUCUUCCACAGACUGGAAGAAAGCUUCCUGGUCGAAGAAGACAAGAAGCACGAAAG | |
| minimal | ACACCCGAUCUUCGGAAACAUCGUCGACGAAGUCGCAUACCACGAAAAGUACCCGACAAUCUACCACCUGAGAAAGAAGCUGGUCG | |
| uridine | ACAGCACAGACAAGGCAGACCUGAGACUGAUCUACCUGGCACUGGCACACAUGAUCAAGUUCAGAGGACACUUCCUGAUCGAAGGA | |
| codons as | GACCUGAACCCGGACAACAGCGACGUCGACAAGCUGUUCAUCCAGCUGGUCCAGACAUACAACCAGCUGUUCGAAGAAAACCCGAU | |
| listed in | CAACGCAAGCGGAGUCGACGCAAAGGCAAUCCUGAGCGCAAGACUGAGCAAGAGCAGAAGACUGGAAAACCUGAUCGCACAGCUGC | |
| Table 3, | CGGGAGAAAAGAAGAACGGACUGUUCGGAAACCUGAUCGCACUGAGCCUGGGACUGACACCGAACUUCAAGAGCAACUUCGACCUG | |
| with start | GCAGAAGACGCAAAGCUGCAGCUGAGCAAGGACACAUACGACGACGACCUGGACAACCUGCUGGCACAGAUCGGAGACCAGUACGC | |
| and stop | AGACCUGUUCCUGGCAGCAAAGAACCUGAGCGACGCAAUCCUGCUGAGCGACAUCCUGAGAGUCAACACAGAAAUCACAAAGGCAC | |
| codons | CGCUGAGCGCAAGCAUGAUCAAGAGAUACGACGAACACCACCAGGACCUGACACUGCUGAAGGCACUGGUCAGACAGCAGCUGCCG | |
| | GAAAAGUACAAGGAAAUCUUCUUCGACCAGAGCAAGAACGGAUACGCAGGAUACAUCGACGGAGGAGCAAGCCAGGAAGAAUUCUA | |
| | CAAGUUCAUCAAGCCGAUCCUGGAAAAGAUGGACGGAACAGAAGAACUGCUGGUCAAGCUGAACAGAGAAGACCUGCUGAGAAAGC | |
| | AGAGAACAUUCGACAACGGAAGCAUCCCGCACCAGAUCCACCUGGGAGAACUGCACGCAAUCCUGAGAAGACAGGAAGACUUCUAC | |
| | CCGUUCCUGAAGGACAACAGAGAAAAGAUCGAAAAGAUCCUGACAUUCAGAAUCCCGUACUACGUCGGACCGCUGGCAAGAGGAAA | |
| | CAGCAGAUUCGCAUGGAUGACAAGAAAGAGCGAAGAAACAAUCACACCGUGGAACUUCGAAGAAGUCGUCGACAAGGGAGCAAGCG | |
| | CACAGAGCUUCAUCGAAAGAAUGACAAACUUCGACAAGAACCUGCCGAACGAAAAGGUCCUGCCGAAGCACAGCCUGCUGUACGAA | |
| | UACUUCACAGUCUACAACGAACUGACAAAGGUCAAGUACGUCACAGAAGGAAUGAGAAAGCCGGCAUUCCUGAGCGGAGAACAGAA | |
| | GAAGGCAAUCGUCGACCUGCUGUUCAAGACAAACAGAAAGGUCACAGUCAAGCAGCUGAAGGAAGACUACUUCAAGAAGAUCGAAU | |
| | GCUUCGACAGCGUCGAAAUCAGCGGAGUCGAAGACAGAUUCAACGCAAGCCUGGGAACAUACCACGACCUGCUGAAGAUCAUCAAG | |
| | GACAAGGACUUCCUGGACAACGAAGAAAACGAAGACAUCCUGGAAGACAUCGUCCUGACACUGACACUGUUCGAAGACAGAGAAAU | |
| | GAUCGAAGAAAGACUGAAGACAUACGCACACCUGUUCGACGACAAGGUCAUGAAGCAGCUGAAGAGAAGAAGAUACACAGGAUGGG | |
| | GAAGACUGAGCAGAAAGCUGAUCAACGGAAUCAGAGACAAGCAGAGCGGAAAGACAAUCCUGGACUUCCUGAAGAGCGACGGAUUC | |
| | GCAAACAGAAACUUCAUGCAGCUGAUCCACGACGACAGCCUGACAUUCAAGGAAGACAUCCAGAAGGCACAGGUCAGCGGACAGGG | |
| | AGACAGCCUGCACGAACACAUCGCAAACCUGGCAGGAAGCCCGGCAAUCAAGAAGGGAAUCCUGCAGACAGUCAAGGUCGUCGACG | |
| | AACUGGUCAAGGUCAUGGGAAGACACAAGCCGGAAAACAUCGUCAUCGAAAUGGCAAGAGAAAACCAGACAACACAGAAGGGACAG | |
| | AAGAACAGCAGAGAAAGAAUGAAGAGAAUCGAAGAAGGAAUCAAGGAACUGGGAAGCCAGAUCCUGAAGGAACACCCGGUCGAAAA | |
| | CACACAGCUGCAGAACGAAAAGCUGUACCUGUACUACCUGCAGAACGGAAGAGACAUGUACGUCGACCAGGAACUGGACAUCAACA | |
| | GACUGAGCGACUACGACGUCGACGCAAUCGUCCCGCAGAGCUUCCUGAAGGACGACAGCAUCGACAACAAGGUCCUGACAAGAAGC | |
| | GACAAGAACAGAGGAAAGAGCGACAACGUCCCGAGCGAAGAAGUCGUCAAGAAGAUGAAGAACUACUGGAGACAGCUGCUGAACGC | |
| | AAAGCUGAUCACACAGAGAAAGUUCGACAACCUGACAAAGGCAGAGAGAGGAGGACUGAGCGAACUGGACAAGGCAGGAUUCAUCA | |
| | AGAGACAGCUGGUCGAAACAAGACAGAUCACAAAGCACGUCGCACAGAUCCUGGACAGCAGAAUGAACACAAAGUACGACGAAAAC | |
| | GACAAGCUGAUCAGAGAAGUCAAGGUCAUCACACUGAAGAGCAAGCUGGUCAGCGACUUCAGAAAGGACUUCCAGUUCUACAAGGU | |
| | CAGAGAAAUCAACAACUACCACCACGCACACGACGCAUACCUGAACGCAGUCGUCGGAACAGCACUGAUCAAGAAGUACCCGAAGC | |
| | UGGAAAGCGAAUUCGUCUACGGAGACUACAAGGUCUACGACGUCAGAAAGAUGAUCGCAAAGAGCGAACAGGAAAUCGGAAAGGCA | |
| | ACAGCAAAGUACUUCUUCUACAGCAACAUCAUGAACUUCUUCAAGACAGAAAUCACACUGGCAAACGGAGAAAUCAGAAAGAGACC | |
| | GCUGAUCGAAACAAACGGAGAAACAGGAGAAAUCGUCUGGGACAAGGGAAGAGACUUCGCAACAGUCAGAAAGGUCCUGAGCAUGC | |
| | CGCAGGUCAACAUCGUCAAGAAGACAGAAGUCCAGACAGGAGGAUUCAGCAAGGAAAGCAUCCUGCCGAAGAGAAACAGCGACAAG | |
| | CUGAUCGCAAGAAAGAAGGACUGGGACCCGAAGAAGUACGGAGGAUUCGACAGCCCGACAGUCGCAUACAGCGUCCUGGUCGUCGC | |
| | AAAGGUCGAAAAGGGAAAGAGCAAGAAGCUGAAGAGCGUCAAGGAACUGCUGGGAAUCACAAUCAUGGAAAGAAGCAGCUUCGAAA | |
| | AGAACCCGAUCGACUUCCUGGAAGCAAAGGGAUACAAGGAAGUCAAGAAGGACCUGAUCAUCAAGCUGCCGAAGUACAGCCUGUUC | |
| | GAACUGGAAAACGGAAGAAAGAGAAUGCUGGCAAGCGCAGGAGAACUGCAGAAGGGAAACGAACUGGCACUGCCGAGCAAGUACGU | |
| | CAACUUCCUGUACCUGGCAAGCCACUACGAAAAGCUGAAGGGAAGCCCGGAAGACAACGAACAGAAGCAGCUGUUCGUCGAACAGC | |
| | ACAAGCACUACCUGGACGAAAUCAUCGAACAGAUCAGCGAAUUCAGCAAGAGAGUCAUCCUGGCAGACGCAAACCUGGACAAGGUC | |
| | CUGAGCGCAUACAACAAGCACAGAGACAAGCCGAUCAGAGAACAGGCAGAAAACAUCAUCCACCUGUUCACACUGACAAACCUGGG | |
| | AGCACCGGCAGCAUUCAAGUACUUCGACACAACAAUCGACAGAAAGAGAUACACAAGCACAAAGGAAGUCCUGGACGCAACACUGA | |
| | UCCACCAGAGCAUCACAGGACUGUACGAAACAAGAAUCGACCUGAGCCAGCUGGGAGGAGAC | |
| | GGAAGCGGAAGCCCGAAGAAGAAGAGAAAGGUCGACGGAAGCCCGAAGAAGAAGAGAAAGGUCGACAGCGGAUAG | |
| dCas9 coding | GACAAGAAGUACAGCAUCGGACUGGCAAUCGGAACAAACAGCGUCGGAUGGGCAGUCAUCACAGACGAAUACAAGGUCCCGAGCAA | 230 |
| sequence | GAAGUUCAAGGUCCUGGGAAACACAGACAGACACAGCAUCAAGAAGAACCUGAUCGGAGCACUGCUGUUCGACAGCGGAGAAACAG | |
| encoding SEQ | CAGAAGCAACAAGACUGAAGAGAACAGCAAGAAGAAGAUACACAAGAAGAAAGAACAGAAUCUGCUACCUGCAGGAAAUCUUCAGC | |
| ID NO: 28 | AACGAAAUGGCAAAGGUCGACGACAGCUUCUUCCACAGACUGGAAGAAAGCUUCCUGGUCGAAGAAGACAAGAAGCACGAAAGACA | |
| using | CCCGAUCUUCGGAAACAUCGUCGACGAAGUCGCAUACCACGAAAAGUACCCGACAAUCUACCACCUGAGAAAGAAGCUGGUCGACA | |
| minimal | GCACAGACAAGGCAGACCUGAGACUGAUCUACCUGGCACUGGCACACAUGAUCAAGUUCAGAGGACACUUCCUGAUCGAAGGAGAC | |
| uridine | CUGAACCCGGACAACAGCGACGUCGACAAGCUGUUCAUCCAGCUGGUCCAGACAUACAACCAGCUGUUCGAAGAAAACCCGAUCAA | |
| codons as | CGCAAGCGGAGUCGACGCAAAGGCAAUCCUGAGCGCAAGACUGAGCAAGAGCAGAAGACUGGAAAACCUGAUCGCACAGCUGCCGG | |
| listed in | GAGAAAAGAAGAACGGACUGUUCGGAAACCUGAUCGCACUGAGCCUGGGACUGACACCGAACUUCAAGAGCAACUUCGACCUGGCA | |
| Table 3 (no | GAAGACGCAAAGCUGCAGCUGAGCAAGGACACAUACGACGACGACCUGGACAACCUGCUGGCACAGAUCGGAGACCAGUACGCAGA | |
| start or | CCUGUUCCUGGCAGCAAAGAACCUGAGCGACGCAAUCCUGCUGAGCGACAUCCUGAGAGUCAACACAGAAAUCACAAAGGCACCGC | |
| stop codons; | UGAGCGCAAGCAUGAUCAAGAGAUACGACGAACACCACCAGGACCUGACACUGCUGAAGGCACUGGUCAGACAGCAGCUGCCGGAA | |
| suitable for | AAGUACAAGGAAAUCUUCUUCGACCAGAGCAAGAACGGAUACGCAGGAUACAUCGACGGAGGAGCAAGCCAGGAAGAAUUCUACAA | |
| inclusion in | GUUCAUCAAGCCGAUCCUGGAAAAGAUGGACGGAAGAGAAGAACUGCUGGUCAAGCUGAACAGAGAAGACCUGCUGAGAAAGCAGA | |
| fusion | GAACAUUCGACAACGGAAGCAUCCCGCACCAGAUCCACCUGGGAGAACUGCACGCAAUCCUGAGAAGACAGGAAGACUUCUACCCG | |
| protein | UUCCUGAAGGACAACAGAGAAAAGAUCGAAAAGAUCCUGACAUUCAGAAUCCCGUACUACGUCGGACCGCUGGCAAGAGGAAACAG | |
| coding | CAGAUUCGCAUGGAUGACAAGAAAGAGCGAAGAAACAAUCACACCGUGGAACUUCGAAGAAGUCGUCGACAAGGGAGCAAGCGCAC | |
| sequence) | AGAGCUUCAUCGAAAGAAUGACAAACUUCGACAAGAACCUGCCGAACGAAAAGGUCCUGCCGAAGCACAGCCUGCUGUACGAAUAC | |
| | UUCACAGUCUACAACGAACUGACAAAGGUCAAGUACGUCACAGAAGGAAUGAGAAAGCCGGCAUUCCUGAGCGGAGAACAGAAGAA | |
| | GGCAAUCGUCGACCUGCUGUUCAAGACAAACAGAAAGGUCACAGUCAAGCAGCUGAAGGAAGACUACUUCAAGAAGAUCGAAUGCU | |
| | UCGACAGCGUCGAAAUCAGCGGAGUCGAAGACAGAUUCAACGCAAGCCUGGGAACAUACCACGACCUGCUGAAGAUCAUCAAGGAC | |
| | AAGGACUUCCUGGACAACGAAGAAAACGAAGACAUCCUGGAAGACAUCGUCCUGACACUGACACUGUUCGAAGACAGAGAAAUGAU | |
| | CGAAGAAAGACUGAAGACAUACGCACACCUGUUCGACGACAAGGUCAUGAAGCAGCUGAAGAGAAGAAGAUACACAGGAUGGGGAA | |
| | GACUGAGCAGAAAGCUGAUCAACGGAAUCAGAGACAAGCAGAGCGGAAAGACAAUCCUGGACUUCCUGAAGAGCGACGGAUUCGCA | |
| | AACAGAAACUUCAUGCAGCUGAUCCACGACGACAGCCUGACAUUCAAGGAAGACAUCCAGAAGGCACAGGUCAGCGGACAGGGAGA | |
| | CAGCCUGCACGAACACAUCGCAAACCUGGCAGGAAGCCCGGCAAUCAAGAAGGGAAUCCUGCAGACAGUCAAGGUCGUCGACGAAC | |
| | UGGUCAAGGUCAUGGGAAGACACAAGCCGGAAAACAUCGUCAUCGAAAUGGCAAGAGAAAACCAGACAACACAGAAGGGACAGAAG | |
| | AACAGCAGAGAAAGAAUGAAGAGAAUCGAAGAAGGAAUCAAGGAACUGGGAAGCCAGAUCCUGAAGGAACACCCGGUCGAAAACAC | |
| | ACAGCUGCAGAACGAAAAGCUGUACCUGUACUACCUGCAGAACGGAAGAGACAUGUACGUCGACCAGGAACUGGACAUCAACAGAC | |
| | UGAGCGACUACGACGUCGACGCAAUCGUCCCGCAGAGCUUCCUGAAGGACGACAGCAUCGACAACAAGGUCCUGACAAGAAGCGAC | |
| | AAGAACAGAGGAAAGAGCGACAACGUCCCGAGCGAAGAAGUCGUCAAGAAGAUGAAGAACUACUGGAGACAGCUGCUGAACGCAAA | |
| | GCUGAUCACACAGAGAAAGUUCGACAACCUGACAAAGGCAGAGAGAGGAGGACUGAGCGAACUGGACAAGGCAGGAUUCAUCAAGA | |
| | GACAGCUGGUCGAAACAAGACAGAUCACAAAGCACGUCGCACAGAUCCUGGACAGCAGAAUGAACACAAAGUACGACGAAAACGAC | |
| | AAGCUGAUCAGAGAAGUCAAGGUCAUCACACUGAAGAGCAAGCUGGUCAGCGACUUCAGAAAGGACUUCCAGUUCUACAAGGUCAG | |
| | AGAAAUCAACAACUACCACCACGCACACGACGCAUACCUGAACGCAGUCGUCGGAACAGCACUGAUCAAGAAGUACCCGAAGCUGG | |
| | AAAGCGAAUUCGUCUACGGAGACUACAAGGUCUACGACGUCAGAAAGAUGAUCGCAAAGAGCGAACAGGAAAUCGGAAAGGCAACA | |
| | GCAAAGUACUUCUUCUACAGCAACAUCAUGAACUUCUUCAAGACAGAAAUCACACUGGCAAACGGAGAAAUCAGAAAGAGACCGCU | |
| | GAUCGAAACAAACGGAGAAACAGGAGAAAUCGUCUGGGACAAGGGAAGAGACUUCGCAACAGUCAGAAAGGUCCUGAGCAUGCCGC | |
| | AGGUCAACAUCGUCAAGAAGACAGAAGUCCAGACAGGAGGAUUCAGCAAGGAAAGCAUCCUGCCGAAGAGAAACAGCGACAAGCUG | |
| | AUCGCAAGAAAGAAGGACUGGGACCCGAAGAAGUACGGAGGAUUCGACAGCCCGACAGUCGCAUACAGCGUCCUGGUCGUCGCAAA | |
| | GGUCGAAAAGGGAAAGAGCAAGAAGCUGAAGAGCGUCAAGGAACUGCUGGGAAUCACAAUCAUGGAAAGAAGCAGCUUCGAAAAGA | |
| | ACCCGAUCGACUUCCUGGAAGCAAAGGGAUACAAGGAAGUCAAGAAGGACCUGAUCAUCAAGCUGCCGAAGUACAGCCUGUUCGAA | |
| | CUGGAAAACGGAAGAAAGAGAAUGCUGGCAAGCGCAGGAGAACUGCAGAAGGGAAACGAACUGGCACUGCCGAGCAAGUACGUCAA | |
| | CUUCCUGUACCUGGCAAGCCACUACGAAAAGCUGAAGGGAAGCCCGGAAGACAACGAACAGAAGCAGCUGUUCGUCGAACAGCACA | |
| | AGCACUACCUGGACGAAAUCAUCGAACAGAUCAGCGAAUUCAGCAAGAGAGUCAUCCUGGCAGACGCAAACCUGGACAAGGUCCUG | |
| | AGCGCAUACAACAAGCACAGAGACAAGCCGAUCAGAGAACAGGCAGAAAACAUCAUCCACCUGUUCACACUGACAAACCUGGGAGC | |
| | ACCGGCAGCAUUCAAGUACUUCGACACAACAAUCGACAGAAAGAGAUACACAAGCACAAAGGAAGUCCUGGACGCAACACUGAUCC | |
| | ACCAGAGCAUCACAGGACUGUACGAAACAAGAAUCGACCUGAGCCAGCUGGGAGGAGAC | |
| | GGAAGCGGAAGCCCGAAGAAGAAGAGAAAGGUCGACGGAAGCCCGAAGAAGAAGAGAAAGGUCGACAGCGGA | |
| T7 promoter | TAATACGACTCACTATA | 231 |
| Human beta- | ACATTTGCTTCTGACACAACTGTGTTCACTAGCAACCTCAAACAGACACC | 232 |
| globin 5′ | | |
| UTR | | |
| Human beta- | GCTCGCTTTCTTGCTGTCCAATTTCTATTAAAGGTTCCTTTGTTCCCTAAGTCCAACTACTAAACTGGGGGATATTATGAAGGGCC | 233 |
| globin 3′ | TTGAGCATCTGGATTCTGCCTAATAAAAAACATTTATTTTCATTGC | |
| UTR | | |
| Human alpha- | CATAAACCCTGGCGCGCTCGCGGCCCGGCACTCTTCTGGTCCCCACAGACTCAGAGAGAACCCACC | 234 |
| globin 5′ | | |
| UTR | | |
| Human alpha- | GCTGGAGCCTCGGTGGCCATGCTTCTTGCCCCTTGGGCCTCCCCCCAGCCCCTCCTCCCCTTCCTGCACCCGTACCCCCGTGGTCT | 235 |
| globin 3′ | TTGAATAAAGTCTGAGTGGGCGGC | |
| UTR | | |
| Xenopus | AAGCTCAGAATAAACGCTCAACTTTGGCC | 236 |
| laevis beta- | | |
| globin 5′ | | |
| UTR | | |
| Xenopus | ACCAGCCTCAAGAACACCCGAATGGAGTCTCTAAGCTACATAATACCAACTTACACTTTACAAAATGTTGTCCCCCAAAATGTAGC | 237 |
| laevis beta- | CATTCGTATCTGCTCCTAATAAAAAGAAAGTTTCTTCACATTCT | |
| globin 3′ | | |
| UTR | | |
| Bovine | CAGGGTCCTGTGGACAGCTCACCAGCT | 238 |
| Growth | | |
| Hormone 5′ | | |
| UTR | | |
| Bovine | TTGCCAGCCATCTGTTGTTTGCCCCTCCCCCGTGCCTTCCTTGACCCTGGAAGGTGCCACTCCCACTGTCCTTTCCTAATAAAATG | 239 |
| Growth | AGGAAATTGCATCGCA | |
| Hormone 3′ | | |
| UTR | | |
| Mus musculus | GCTGCCTTCTGCGGGGCTTGCCTTCTGGCCATGCCCTTCTTCTCTCCCTTGCACCTGTACCTCTTGGTCTTTGAATAAAGCCTGAG | 240 |
| hemoglobin | TAGGAAG | |
| alpha, adult | | |
| chain 1 | | |
| (Hba-a1), | | |
| 3′UTR | | |
| HSD17B4 5′ | TCCCGCAGTCGGCGTCCAGCGGCTCTGCTTGTTCGTGTGTGTGTCGTTGCAGGCCTTATTC | 241 |
| UTR | | |
| G282 guide | mU*mU*mA*CAGCCACGUCUACAGCAGUUUUAGAmGmCmUmAmGmAmAmAmUmAmGmCAAGUUAAAAUAAGGCUAGUCCGUUAUCA | 242 |
| RNA | mAmCmUmUmGGmUmGmGmCmAmCmCmGmAmGmUmCmGmGmUmGmCmU*mU*mU*mU | |
| targeting | | |
| TTR | | |
| Cas9 | GGGTCCCGCAGTCGGCGTCCAGCGGCTCTGCTTGTTCGTGTGTGTGTCGTTGCAGGCCTTATTCGGATCCGCCACCATGGACAAGA | 243 |
| transcript | AGTACAGCATCGGACTGGACATCGGAACAAACAGCGTCGGATGGGCAGTCATCACAGACGAATACAAGGTCCCGAGCAAGAAGTTC | |
| with 5′ UTR | AAGGTCCTGGGAAACACAGACAGACACAGCATCAAGAAGAACCTGATCGGAGCACTGCTGTTCGACAGCGGAGAAACAGCAGAAGC | |
| of HSD, ORF | AACAAGACTGAAGAGAACAGCAAGAAGAAGATACACAAGAAGAAAGAACAGAATCTGCTACCTGCAGGAAATCTTCAGCAACGAAA | |
| corresponding | TGGCAAAGGTCGACGACAGCTTCTTCCACAGACTGGAAGAAAGCTTCCTGGTCGAAGAAGACAAGAAGCACGAAAGACACCCGATC | |
| to SEQ ID | TTCGGAAACATCGTCGACGAAGTCGCATACCACGAAAAGTACCCGACAATCTACCACCTGAGAAAGAAGCTGGTCGACAGCACAGA | |
| NO: 4, Kozak | CAAGGCAGACCTGAGACTGATCTACCTGGCACTGGCACACATGATCAAGTTCAGAGGACACTTCCTGATCGAAGGAGACCTGAACC | |
| sequence, | CGGACAACAGCGACGTCGACAAGCTGTTCATCCAGCTGGTCCAGACATACAACCAGCTGTTCGAAGAAAACCCGATCAACGCAAGC | |
| and 3′ UTR | GGAGTCGACGCAAAGGCAATCCTGAGCGCAAGACTGAGCAAGAGCAGAAGACTGGAAAACCTGATCGCACAGCTGCCGGGAGAAAA | |
| of ALB | GAAGAACGGACTGTTCGGAAACCTGATCGCACTGAGCCTGGGACTGACACCGAACTTCAAGAGCAACTTCGACCTGGCAGAAGACG | |
| | CAAAGCTGCAGCTGAGCAAGGACACATACGACGACGACCTGGACAACCTGCTGGCACAGATCGGAGACCAGTACGCAGACCTGTTC | |
| | CTGGCAGCAAAGAACCTGAGCGACGCAATCCTGCTGAGCGACATCCTGAGAGTCAACACAGAAATCACAAAGGCACCGCTGAGCGC | |
| | AAGCATGATCAAGAGATACGACGAACACCACCAGGACCTGACACTGCTGAAGGCACTGGTCAGACAGCAGCTGCCGGAAAAGTACA | |
| | AGGAAATCTTCTTCGACCAGAGCAAGAACGGATACGCAGGATACATCGACGGAGGAGCAAGCCAGGAAGAATTCTACAAGTTCATC | |
| | AAGCCGATCCTGGAAAAGATGGACGGAACAGAAGAACTGCTGGTCAAGCTGAACAGAGAAGACCTGCTGAGAAAGCAGAGAACATT | |
| | CGACAACGGAAGCATCCCGCACCAGATCCACCTGGGAGAACTGCACGCAATCCTGAGAAGACAGGAAGACTTCTACCCGTTCCTGA | |
| | AGGACAACAGAGAAAAGATCGAAAAGATCCTGACATTCAGAATCCCGTACTACGTCGGACCGCTGGCAAGAGGAAACAGCAGATTC | |
| | GCATGGATGACAAGAAAGAGCGAAGAAACAATCACACCGTGGAACTTCGAAGAAGTCGTCGACAAGGGAGCAAGCGCACAGAGCTT | |
| | CATCGAAAGAATGACAAACTTCGACAAGAACCTGCCGAACGAAAAGGTCCTGCCGAAGCACAGCCTGCTGTACGAATACTTCACAG | |
| | TCTACAACGAACTGACAAAGGTCAAGTACGTCACAGAAGGAATGAGAAAGCCGGCATTCCTGAGCGGAGAACAGAAGAAGGCAATC | |
| | GTCGACCTGCTGTTCAAGACAAACAGAAAGGTCACAGTCAAGCAGCTGAAGGAAGACTACTTCAAGAAGATCGAATGCTTCGACAG | |
| | CGTCGAAATCAGCGGAGTCGAAGACAGATTCAACGCAAGCCTGGGAACATACCACGACCTGCTGAAGATCATCAAGGACAAGGACT | |
| | TCCTGGACAACGAAGAAAACGAAGACATCCTGGAAGACATCGTCCTGACACTGACACTGTTCGAAGACAGAGAAATGATCGAAGAA | |
| | AGACTGAAGACATACGCACACCTGTTCGACGACAAGGTCATGAAGCAGCTGAAGAGAAGAAGATACACAGGATGGGGAAGACTGAG | |
| | CAGAAAGCTGATCAACGGAATCAGAGACAAGCAGAGCGGAAAGACAATCCTGGACTTCCTGAAGAGCGACGGATTCGCAAACAGAA | |
| | ACTTCATGCAGCTGATCCACGACGACAGCCTGACATTCAAGGAAGACATCCAGAAGGCACAGGTCAGCGGACAGGGAGACAGCCTG | |
| | CACGAACACATCGCAAACCTGGCAGGAAGCCCGGCAATCAAGAAGGGAATCCTGCAGACAGTCAAGGTCGTCGACGAACTGGTCAA | |
| | GGTCATGGGAAGACACAAGCCGGAAAACATCGTCATCGAAATGGCAAGAGAAAACCAGACAACACAGAAGGGACAGAAGAACAGCA | |
| | GAGAAAGAATGAAGAGAATCGAAGAAGGAATCAAGGAACTGGGAAGCCAGATCCTGAAGGAACACCCGGTCGAAAACACACAGCTG | |
| | CAGAACGAAAAGCTGTACCTGTACTACCTGCAGAACGGAAGAGACATGTACGTCGACCAGGAACTGGACATCAACAGACTGAGCGA | |
| | CTACGACGTCGACCACATCGTCCCGCAGAGCTTCCTGAAGGACGACAGCATCGACAACAAGGTCCTGACAAGAAGCGACAAGAACA | |
| | GAGGAAAGAGCGACAACGTCCCGAGCGAAGAAGTCGTCAAGAAGATGAAGAACTACTGGAGACAGCTGCTGAACGCAAAGCTGATC | |
| | ACACAGAGAAAGTTCGACAACCTGACAAAGGCAGAGAGAGGAGGACTGAGCGAACTGGACAAGGCAGGATTCATCAAGAGACAGCT | |
| | GGTCGAAACAAGACAGATCACAAAGCACGTCGCACAGATCCTGGACAGCAGAATGAACACAAAGTACGACGAAAACGACAAGCTGA | |
| | TCAGAGAAGTCAAGGTCATCACACTGAAGAGCAAGCTGGTCAGCGACTTCAGAAAGGACTTCCAGTTCTACAAGGTCAGAGAAATC | |
| | AACAACTACCACCACGCACACGACGCATACCTGAACGCAGTCGTCGGAACAGCACTGATCAAGAAGTACCCGAAGCTGGAAAGCGA | |
| | ATTCGTCTACGGAGACTACAAGGTCTACGACGTCAGAAAGATGATCGCAAAGAGCGAACAGGAAATCGGAAAGGCAACAGCAAAGT | |
| | ACTTCTTCTACAGCAACATCATGAACTTCTTCAAGACAGAAATCACACTGGCAAACGGAGAAATCAGAAAGAGACCGCTGATCGAA | |
| | ACAAACGGAGAAACAGGAGAAATCGTCTGGGACAAGGGAAGAGACTTCGCAACAGTCAGAAAGGTCCTGAGCATGCCGCAGGTCAA | |
| | CATCGTCAAGAAGACAGAAGTCCAGACAGGAGGATTCAGCAAGGAAAGCATCCTGCCGAAGAGAAACAGCGACAAGCTGATCGCAA | |
| | GAAAGAAGGACTGGGACCCGAAGAAGTACGGAGGATTCGACAGCCCGACAGTCGCATACAGCGTCCTGGTCGTCGCAAAGGTCGAA | |
| | AAGGGAAAGAGCAAGAAGCTGAAGAGCGTCAAGGAACTGCTGGGAATCACAATCATGGAAAGAAGCAGCTTCGAAAAGAACCCGAT | |
| | CGACTTCCTGGAAGCAAAGGGATACAAGGAAGTCAAGAAGGACCTGATCATCAAGCTGCCGAAGTACAGCCTGTTCGAACTGGAAA | |
| | ACGGAAGAAAGAGAATGCTGGCAAGCGCAGGAGAACTGCAGAAGGGAAACGAACTGGCACTGCCGAGCAAGTACGTCAACTTCCTG | |
| | TACCTGGCAAGCCACTACGAAAAGCTGAAGGGAAGCCCGGAAGACAACGAACAGAAGCAGCTGTTCGTCGAACAGCACAAGCACTA | |
| | CCTGGACGAAATCATCGAACAGATCAGCGAATTCAGCAAGAGAGTCATCCTGGCAGACGCAAACCTGGACAAGGTCCTGAGCGCAT | |
| | ACAACAAGCACAGAGACAAGCCGATCAGAGAACAGGCAGAAAACATCATCCACCTGTTCACACTGACAAACCTGGGAGCACCGGCA | |
| | GCATTCAAGTACTTCGACACAACAATCGACAGAAAGAGATACACAAGCACAAAGGAAGTCCTGGACGCAACACTGATCCACCAGAG | |
| | CATCACAGGACTGTACGAAACAAGAATCGACCTGAGCCAGCTGGGAGGAGACGGAGGAGGAAGCCCGAAGAAGAAGAGAAAGGTCT | |
| | AGCTAGCCATCACATTTAAAAGCATCTCAGCCTACCATGAGAATAAGAGAAAGAAAATGAAGATCAATAGCTTATTCATCTCTTTT | |
| | TCTTTTTCGTTGGTGTAAAGCCAACACCCTGTCTAAAAAACATAAATTTCTTTAATCATTTTGCCTCTTTTCTCTGTGCTTCAATT | |
| | AATAAAAAATGGAAAGAACCTCGAG | |
| Cas9 | GGGTCCCGCAGTCGGCGTCCAGCGGCTCTGCTTGTTCGTGTGTGTGTCGTTGCAGGCCTTATTCGGATCCATGGACAAGAAGTACA | 244 |
| transcript | GCATCGGACTGGACATCGGAACAAACAGCGTCGGATGGGCAGTCATCACAGACGAATACAAGGTCCCGAGCAAGAAGTTCAAGGTC | |
| with 5′ UTR | CTGGGAAACACAGACAGACACAGCATCAAGAAGAACCTGATCGGAGCACTGCTGTTCGACAGCGGAGAAACAGCAGAAGCAACAAG | |
| of HSD, ORF | ACTGAAGAGAACAGCAAGAAGAAGATACACAAGAAGAAAGAACAGAATCTGCTACCTGCAGGAAATCTTCAGCAACGAAATGGCAA | |
| corresponding | AGGTCGACGACAGCTTCTTCCACAGACTGGAAGAAAGCTTCCTGGTCGAAGAAGACAAGAAGCACGAAAGACACCCGATCTTCGGA | |
| to SEQ ID | AACATCGTCGACGAAGTCGCATACCACGAAAAGTACCCGACAATCTACCACCTGAGAAAGAAGCTGGTCGACAGCACAGACAAGGC | |
| NO: 4, and | AGACCTGAGACTGATCTACCTGGCACTGGCACACATGATCAAGTTCAGAGGACACTTCCTGATCGAAGGAGACCTGAACCCGGACA | |
| 3′ UTR of | ACAGCGACGTCGACAAGCTGTTCATCCAGCTGGTCCAGACATACAACCAGCTGTTCGAAGAAAACCCGATCAACGCAAGCGGAGTC | |
| ALB | GACGCAAAGGCAATCCTGAGCGCAAGACTGAGCAAGAGCAGAAGACTGGAAAACCTGATCGCACAGCTGCCGGGAGAAAAGAAGAA | |
| | CGGACTGTTCGGAAACCTGATCGCACTGAGCCTGGGACTGACACCGAACTTCAAGAGCAACTTCGACCTGGCAGAAGACGCAAAGC | |
| | TGCAGCTGAGCAAGGACACATACGACGACGACCTGGACAACCTGCTGGCACAGATCGGAGACCAGTACGCAGACCTGTTCCTGGCA | |
| | GCAAAGAACCTGAGCGACGCAATCCTGCTGAGCGACATCCTGAGAGTCAACACAGAAATCACAAAGGCACCGCTGAGCGCAAGCAT | |
| | GATCAAGAGATACGACGAACACCACCAGGACCTGACACTGCTGAAGGCACTGGTCAGACAGCAGCTGCCGGAAAAGTACAAGGAAA | |
| | TCTTCTTCGACCAGAGCAAGAACGGATACGCAGGATACATCGACGGAGGAGCAAGCCAGGAAGAATTCTACAAGTTCATCAAGCCG | |
| | ATCCTGGAAAAGATGGACGGAAGAGAAGAACTGCTGGTCAAGCTGAACAGAGAAGACCTGCTGAGAAAGCAGAGAACATTCGACAA | |
| | CGGAAGCATCCCGCACCAGATCCACCTGGGAGAACTGCACGCAATCCTGAGAAGACAGGAAGACTTCTACCCGTTCCTGAAGGACA | |
| | ACAGAGAAAAGATCGAAAAGATCCTGACATTCAGAATCCCGTACTACGTCGGACCGCTGGCAAGAGGAAACAGCAGATTCGCATGG | |
| | ATGACAAGAAAGAGCGAAGAAACAATCACACCGTGGAACTTCGAAGAAGTCGTCGACAAGGGAGCAAGCGCACAGAGCTTCATCGA | |
| | AAGAATGACAAACTTCGACAAGAACCTGCCGAACGAAAAGGTCCTGCCGAAGCACAGCCTGCTGTACGAATACTTCACAGTCTACA | |
| | ACGAACTGACAAAGGTCAAGTACGTCACAGAAGGAATGAGAAAGCCGGCATTCCTGAGCGGAGAACAGAAGAAGGCAATCGTCGAC | |
| | CTGCTGTTCAAGACAAACAGAAAGGTCACAGTCAAGCAGCTGAAGGAAGACTACTTCAAGAAGATCGAATGCTTCGACAGCGTCGA | |
| | AATCAGCGGAGTCGAAGACAGATTCAACGCAAGCCTGGGAACATACCACGACCTGCTGAAGATCATCAAGGACAAGGACTTCCTGG | |
| | ACAACGAAGAAAACGAAGACATCCTGGAAGACATCGTCCTGACACTGACACTGTTCGAAGACAGAGAAATGATCGAAGAAAGACTG | |
| | AAGACATACGCACACCTGTTCGACGACAAGGTCATGAAGCAGCTGAAGAGAAGAAGATACACAGGATGGGGAAGACTGAGCAGAAA | |
| | GCTGATCAACGGAATCAGAGACAAGCAGAGCGGAAAGACAATCCTGGACTTCCTGAAGAGCGACGGATTCGCAAACAGAAACTTCA | |
| | TGCAGCTGATCCACGACGACAGCCTGACATTCAAGGAAGACATCCAGAAGGCACAGGTCAGCGGACAGGGAGACAGCCTGCACGAA | |
| | CACATCGCAAACCTGGCAGGAAGCCCGGCAATCAAGAAGGGAATCCTGCAGACAGTCAAGGTCGTCGACGAACTGGTCAAGGTCAT | |
| | GGGAAGACACAAGCCGGAAAACATCGTCATCGAAATGGCAAGAGAAAACCAGACAACACAGAAGGGACAGAAGAACAGCAGAGAAA | |
| | GAATGAAGAGAATCGAAGAAGGAATCAAGGAACTGGGAAGCCAGATCCTGAAGGAACACCCGGTCGAAAACACACAGCTGCAGAAC | |
| | GAAAAGCTGTACCTGTACTACCTGCAGAACGGAAGAGACATGTACGTCGACCAGGAACTGGACATCAACAGACTGAGCGACTACGA | |
| | CGTCGACCACATCGTCCCGCAGAGCTTCCTGAAGGACGACAGCATCGACAACAAGGTCCTGACAAGAAGCGACAAGAACAGAGGAA | |
| | AGAGCGACAACGTCCCGAGCGAAGAAGTCGTCAAGAAGATGAAGAACTACTGGAGACAGCTGCTGAACGCAAAGCTGATCACACAG | |
| | AGAAAGTTCGACAACCTGACAAAGGCAGAGAGAGGAGGACTGAGCGAACTGGACAAGGCAGGATTCATCAAGAGACAGCTGGTCGA | |
| | AACAAGACAGATCACAAAGCACGTCGCACAGATCCTGGACAGCAGAATGAACACAAAGTACGACGAAAACGACAAGCTGATCAGAG | |
| | AAGTCAAGGTCATCACACTGAAGAGCAAGCTGGTCAGCGACTTCAGAAAGGACTTCCAGTTCTACAAGGTCAGAGAAATCAACAAC | |
| | TACCACCACGCACACGACGCATACCTGAACGCAGTCGTCGGAACAGCACTGATCAAGAAGTACCCGAAGCTGGAAAGCGAATTCGT | |
| | CTACGGAGACTACAAGGTCTACGACGTCAGAAAGATGATCGCAAAGAGCGAACAGGAAATCGGAAAGGCAACAGCAAAGTACTTCT | |
| | TCTACAGCAACATCATGAACTTCTTCAAGACAGAAATCACACTGGCAAACGGAGAAATCAGAAAGAGACCGCTGATCGAAACAAAC | |
| | GGAGAAACAGGAGAAATCGTCTGGGACAAGGGAAGAGACTTCGCAACAGTCAGAAAGGTCCTGAGCATGCCGCAGGTCAACATCGT | |
| | CAAGAAGACAGAAGTCCAGACAGGAGGATTCAGCAAGGAAAGCATCCTGCCGAAGAGAAACAGCGACAAGCTGATCGCAAGAAAGA | |
| | AGGACTGGGACCCGAAGAAGTACGGAGGATTCGACAGCCCGACAGTCGCATACAGCGTCCTGGTCGTCGCAAAGGTCGAAAAGGGA | |
| | AAGAGCAAGAAGCTGAAGAGCGTCAAGGAACTGCTGGGAATCACAATCATGGAAAGAAGCAGCTTCGAAAAGAACCCGATCGACTT | |
| | CCTGGAAGCAAAGGGATACAAGGAAGTCAAGAAGGACCTGATCATCAAGCTGCCGAAGTACAGCCTGTTCGAACTGGAAAACGGAA | |
| | GAAAGAGAATGCTGGCAAGCGCAGGAGAACTGCAGAAGGGAAACGAACTGGCACTGCCGAGCAAGTACGTCAACTTCCTGTACCTG | |
| | GCAAGCCACTACGAAAAGCTGAAGGGAAGCCCGGAAGACAACGAACAGAAGCAGCTGTTCGTCGAACAGCACAAGCACTACCTGGA | |
| | CGAAATCATCGAACAGATCAGCGAATTCAGCAAGAGAGTCATCCTGGCAGACGCAAACCTGGACAAGGTCCTGAGCGCATACAACA | |
| | AGCACAGAGACAAGCCGATCAGAGAACAGGCAGAAAACATCATCCACCTGTTCACACTGACAAACCTGGGAGCACCGGCAGCATTC | |
| | AAGTACTTCGACACAACAATCGACAGAAAGAGATACACAAGCACAAAGGAAGTCCTGGACGCAACACTGATCCACCAGAGCATCAC | |
| | AGGACTGTACGAAACAAGAATCGACCTGAGCCAGCTGGGAGGAGACGGAGGAGGAAGCCCGAAGAAGAAGAGAAAGGTCTAGCTAG | |
| | CCATCACATTTAAAAGCATCTCAGCCTACCATGAGAATAAGAGAAAGAAAATGAAGATCAATAGCTTATTCATCTCTTTTTCTTTT | |
| | TCGTTGGTGTAAAGCCAACACCCTGTCTAAAAAACATAAATTTCTTTAATCATTTTGCCTCTTTTCTCTGTGCTTCAATTAATAAA | |
| | AAATGGAAAGAACCTCGAG | |
| | Not Used | 245-249 |
| Cas9 ORF | ATGGACAAGAAGTACAGCATCGGACTGGACATCGGAACAAACAGCGTCGGATGGGCAGTCATCACAGACGAATACAAGGTCCCGAG | 250 |
| with splice | CAAGAAGTTCAAGGTCCTGGGAAACACAGACAGACACAGCATCAAGAAGAACCTGATCGGAGCACTGCTGTTCGACAGCGGAGAAA | |
| junctions | CAGCAGAAGCAACAAGACTGAAGAGAACAGCAAGAAGAAGATACACAAGAAGAAAGAACAGAATCTGCTACCTGCAGGAAATCTTC | |
| removed; | AGCAACGAAATGGCAAAGGTCGACGACAGCTTCTTCCACcggCTGGAAGAAAGCTTCCTGGTCGAAGAAGACAAGAAGCACGAAAG | |
| 12.75% U | ACACCCGATCTTCGGAAACATCGTCGACGAAGTCGCATACCACGAAAAGTACCCGACAATCTACCACCTGAGAAAGAAGCTGGTCG | |
| content | ACAGCACAGACAAGGCAGACCTGAGACTGATCTACCTGGCACTGGCACACATGATCAAGTTCAGAGGACACTTCCTGATCGAAGGA | |
| | GACCTGAACCCGGACAACAGCGACGTCGACAAGCTGTTCATCCAGCTGGTCCAGACATACAACCAGCTGTTCGAAGAAAACCCGAT | |
| | CAACGCAAGCGGAGTCGACGCAAAGGCAATCCTGAGCGCAAGACTGAGCAAGAGCAGAAGACTGGAAAACCTGATCGCACAGCTGC | |
| | CGGGAGAAAAGAAGAACGGACTGTTCGGAAACCTGATCGCACTGAGCCTGGGACTGACACCGAACTTCAAGAGCAACTTCGACCTG | |
| | GCAGAAGACGCAAAGCTGCAGCTGAGCAAGGACACATACGACGACGACCTGGACAACCTGCTGGCACAGATCGGAGACCAGTACGC | |
| | AGACCTGTTCCTGGCAGCAAAGAACCTGAGCGACGCAATCCTGCTGAGCGACATCCTGAGAGTCAACACAGAAATCACAAAGGCAC | |
| | CGCTGAGCGCAAGCATGATCAAGAGATACGACGAACACCACCAGGACCTGACACTGCTGAAGGCACTGGTCAGACAGCAGCTGCCG | |
| | GAAAAGTACAAGGAAATCTTCTTCGACCAGAGCAAGAACGGATACGCAGGATACATCGACGGAGGAGCAAGCCAGGAAGAATTCTA | |
| | CAAGTTCATCAAGCCGATCCTGGAAAAGATGGACGGAACAGAAGAACTGCTGGTCAAGCTGAACAGAGAAGACCTGCTGAGAAAGC | |
| | AGAGAACATTCGACAACGGAAGCATCCCGCACCAGATCCACCTGGGAGAACTGCACGCAATCCTGAGAAGACAGGAAGACTTCTAC | |
| | CCGTTCCTGAAGGACAACAGAGAAAAGATCGAAAAGATCCTGACATTCAGAATCCCGTACTACGTCGGACCGCTGGCAAGAGGAAA | |
| | CAGCAGATTCGCATGGATGACAAGAAAGAGCGAAGAAACAATCACACCGTGGAACTTCGAAGAAGTCGTCGACAAGGGAGCAAGCG | |
| | CACAGAGCTTCATCGAAAGAATGACAAACTTCGACAAGAACCTGCCGAACGAAAAGGTCCTGCCGAAGCACAGCCTGCTGTACGAA | |
| | TACTTCACAGTCTACAACGAACTGACAAAGGTCAAGTACGTCACAGAAGGAATGAGAAAGCCGGCATTCCTGAGCGGAGAACAGAA | |
| | GAAGGCAATCGTCGACCTGCTGTTCAAGACAAACAGAAAGGTCACAGTCAAGCAGCTGAAGGAAGACTACTTCAAGAAGATCGAAT | |
| | GCTTCGACAGCGTCGAAATCAGCGGAGTCGAAGACAGATTCAACGCAAGCCTGGGAACATACCACGACCTGCTGAAGATCATCAAG | |
| | GACAAGGACTTCCTGGACAACGAAGAAAACGAAGACATCCTGGAAGACATCGTCCTGACACTGACACTGTTCGAAGACAGAGAAAT | |
| | GATCGAAGAAAGACTGAAGACATACGCACACCTGTTCGACGACAAGGTCATGAAGCAGCTGAAGAGAAGAAGATACACAGGATGGG | |
| | GAAGACTGAGCAGAAAGCTGATCAACGGAATCAGAGACAAGCAGAGCGGAAAGACAATCCTGGACTTCCTGAAGAGCGACGGATTC | |
| | GCAAACAGAAACTTCATGCAGCTGATCCACGACGACAGCCTGACATTCAAGGAAGACATCCAGAAGGCACAGGTCAGCGGACAGGG | |
| | AGACAGCCTGCACGAACACATCGCAAACCTGGCAGGAAGCCCGGCAATCAAGAAGGGAATCCTGCAGACAGTCAAGGTCGTCGACG | |
| | AACTGGTCAAGGTCATGGGAAGACACAAGCCGGAAAACATCGTCATCGAAATGGCAAGAGAAAACCAGACAACACAGAAGGGACAG | |
| | AAGAACAGCAGAGAAAGAATGAAGAGAATCGAAGAAGGAATCAAGGAACTGGGAAGCCAGATCCTGAAGGAACACCCGGTCGAAAA | |
| | CACACAGCTGCAGAACGAAAAGCTGTACCTGTACTACCTGCAaAACGGAAGAGACATGTACGTCGACCAGGAACTGGACATCAACA | |
| | GACTGAGCGACTACGACGTCGACCACATCGTCCCGCAGAGCTTCCTGAAGGACGACAGCATCGACAACAAGGTCCTGACAAGAAGC | |
| | GACAAGAACAGAGGAAAGAGCGACAACGTCCCGAGCGAAGAAGTCGTCAAGAAGATGAAGAACTACTGGAGACAGCTGCTGAACGC | |
| | AAAGCTGATCACACAGAGAAAGTTCGACAACCTGACAAAGGCAGAGAGAGGAGGACTGAGCGAACTGGACAAGGCAGGATTCATCA | |
| | AGAGACAGCTGGTCGAAACAAGACAGATCACAAAGCACGTCGCACAGATCCTGGACAGCAGAATGAACACAAAGTACGACGAAAAC | |
| | GACAAGCTGATCAGAGAAGTCAAGGTCATCACACTGAAGAGCAAGCTGGTCAGCGACTTCAGAAAGGACTTCCAGTTCTACAAGGT | |
| | CAGAGAAATCAACAACTACCACCACGCACACGACGCATACCTGAACGCAGTCGTCGGAACAGCACTGATCAAGAAGTACCCGAAGC | |
| | TGGAAAGCGAATTCGTCTACGGAGACTACAAGGTCTACGACGTCAGAAAGATGATCGCAAAGAGCGAACAGGAAATCGGAAAGGCA | |
| | ACAGCAAAGTACTTCTTCTACAGCAACATCATGAACTTCTTCAAGACAGAAATCACACTGGCAAACGGAGAAATCAGAAAGAGACC | |
| | GCTGATCGAAACAAACGGAGAAACAGGAGAAATCGTCTGGGACAAGGGAAGAGACTTCGCAACAGTCAGAAAGGTCCTGAGCATGC | |
| | CGCAGGTCAACATCGTCAAGAAGACAGAAGTCCAGACAGGAGGATTCAGCAAGGAAAGCATCCTGCCGAAGAGAAACAGCGACAAG | |
| | CTGATCGCAAGAAAGAAGGACTGGGACCCGAAGAAGTACGGAGGATTCGACAGCCCGACAGTCGCATACAGCGTCCTGGTCGTCGC | |
| | AAAGGTCGAAAAGGGAAAGAGCAAGAAGCTGAAGAGCGTCAAGGAACTGCTGGGAATCACAATCATGGAAAGAAGCAGCTTCGAAA | |
| | AGAACCCGATCGACTTCCTGGAAGCAAAGGGATACAAGGAAGTCAAGAAGGACCTGATCATCAAGCTGCCGAAGTACAGCCTGTTC | |
| | GAACTGGAAAACGGAAGAAAGAGAATGCTGGCAAGCGCAGGAGAACTGCAGAAGGGAAACGAACTGGCACTGCCGAGCAAGTACGT | |
| | CAACTTCCTGTACCTGGCAAGCCACTACGAAAAGCTGAAGGGAAGCCCGGAAGACAACGAACAGAAGCAGCTGTTCGTCGAACAGC | |
| | ACAAGCACTACCTGGACGAAATCATCGAACAGATCAGCGAATTCAGCAAGAGAGTCATCCTGGCAGACGCAAACCTGGACAAGGTC | |
| | CTGAGCGCATACAACAAGCACAGAGACAAGCCGATCAGAGAACAGGCAGAAAACATCATCCACCTGTTCACACTGACAAACCTGGG | |
| | AGCACCGGCAGCATTCAAGTACTTCGACACAACAATCGACAGAAAGAGATACACAAGCACAAAGGAAGTCCTGGACGCAACACTGA | |
| | TCCACCAGAGCATCACAGGACTGTACGAAACAAGAATCGACCTGAGCCAGCTGGGAGGAGACGGAGGAGGAAGCCCGAAGAAGAAG | |
| | AGAAAGGTCTAG | |
| Cas9 | GGGTCCCGCAGTCGGCGTCCAGCGGCTCTGCTTGTTCGTGTGTGTGTCGTTGCAGGCCTTATTCGGATCCGCCACCATGGACAAGA | 251 |
| transcript | AGTACAGCATCGGACTGGACATCGGAACAAACAGCGTCGGATGGGCAGTCATCACAGACGAATACAAGGTCCCGAGCAAGAAGTTC | |
| with 5′ UTR | AAGGTCCTGGGAAACACAGACAGACACAGCATCAAGAAGAACCTGATCGGAGCACTGCTGTTCGACAGCGGAGAAACAGCAGAAGC | |
| of HSD, ORF | AACAAGACTGAAGAGAACAGCAAGAAGAAGATACACAAGAAGAAAGAACAGAATCTGCTACCTGCAGGAAATCTTCAGCAACGAAA | |
| corresponding | TGGCAAAGGTCGACGACAGCTTCTTCCACcggCTGGAAGAAAGCTTCCTGGTCGAAGAAGACAAGAAGCACGAAAGACACCCGATC | |
| to SEQ ID | TTCGGAAACATCGTCGACGAAGTCGCATACCACGAAAAGTACCCGACAATCTACCACCTGAGAAAGAAGCTGGTCGACAGCACAGA | |
| NO: 50, | CAAGGCAGACCTGAGACTGATCTACCTGGCACTGGCACACATGATCAAGTTCAGAGGACACTTCCTGATCGAAGGAGACCTGAACC | |
| Kozak | CGGACAACAGCGACGTCGACAAGCTGTTCATCCAGCTGGTCCAGACATACAACCAGCTGTTCGAAGAAAACCCGATCAACGCAAGC | |
| sequence, | GGAGTCGACGCAAAGGCAATCCTGAGCGCAAGACTGAGCAAGAGCAGAAGACTGGAAAACCTGATCGCACAGCTGCCGGGAGAAAA | |
| and 3′ UTR | GAAGAACGGACTGTTCGGAAACCTGATCGCACTGAGCCTGGGACTGACACCGAACTTCAAGAGCAACTTCGACCTGGCAGAAGACG | |
| of ALB | CAAAGCTGCAGCTGAGCAAGGACACATACGACGACGACCTGGACAACCTGCTGGCACAGATCGGAGACCAGTACGCAGACCTGTTC | |
| | CTGGCAGCAAAGAACCTGAGCGACGCAATCCTGCTGAGCGACATCCTGAGAGTCAACACAGAAATCACAAAGGCACCGCTGAGCGC | |
| | AAGCATGATCAAGAGATACGACGAACACCACCAGGACCTGACACTGCTGAAGGCACTGGTCAGACAGCAGCTGCCGGAAAAGTACA | |
| | AGGAAATCTTCTTCGACCAGAGCAAGAACGGATACGCAGGATACATCGACGGAGGAGCAAGCCAGGAAGAATTCTACAAGTTCATC | |
| | AAGCCGATCCTGGAAAAGATGGACGGAACAGAAGAACTGCTGGTCAAGCTGAACAGAGAAGACCTGCTGAGAAAGCAGAGAACATT | |
| | CGACAACGGAAGCATCCCGCACCAGATCCACCTGGGAGAACTGCACGCAATCCTGAGAAGACAGGAAGACTTCTACCCGTTCCTGA | |
| | AGGACAACAGAGAAAAGATCGAAAAGATCCTGACATTCAGAATCCCGTACTACGTCGGACCGCTGGCAAGAGGAAACAGCAGATTC | |
| | GCATGGATGACAAGAAAGAGCGAAGAAACAATCACACCGTGGAACTTCGAAGAAGTCGTCGACAAGGGAGCAAGCGCACAGAGCTT | |
| | CATCGAAAGAATGACAAACTTCGACAAGAACCTGCCGAACGAAAAGGTCCTGCCGAAGCACAGCCTGCTGTACGAATACTTCACAG | |
| | TCTACAACGAACTGACAAAGGTCAAGTACGTCACAGAAGGAATGAGAAAGCCGGCATTCCTGAGCGGAGAACAGAAGAAGGCAATC | |
| | GTCGACCTGCTGTTCAAGACAAACAGAAAGGTCACAGTCAAGCAGCTGAAGGAAGACTACTTCAAGAAGATCGAATGCTTCGACAG | |
| | CGTCGAAATCAGCGGAGTCGAAGACAGATTCAACGCAAGCCTGGGAACATACCACGACCTGCTGAAGATCATCAAGGACAAGGACT | |
| | TCCTGGACAACGAAGAAAACGAAGACATCCTGGAAGACATCGTCCTGACACTGACACTGTTCGAAGACAGAGAAATGATCGAAGAA | |
| | AGACTGAAGACATACGCACACCTGTTCGACGACAAGGTCATGAAGCAGCTGAAGAGAAGAAGATACACAGGATGGGGAAGACTGAG | |
| | CAGAAAGCTGATCAACGGAATCAGAGACAAGCAGAGCGGAAAGACAATCCTGGACTTCCTGAAGAGCGACGGATTCGCAAACAGAA | |
| | ACTTCATGCAGCTGATCCACGACGACAGCCTGACATTCAAGGAAGACATCCAGAAGGCACAGGTCAGCGGACAGGGAGACAGCCTG | |
| | CACGAACACATCGCAAACCTGGCAGGAAGCCCGGCAATCAAGAAGGGAATCCTGCAGACAGTCAAGGTCGTCGACGAACTGGTCAA | |
| | GGTCATGGGAAGACACAAGCCGGAAAACATCGTCATCGAAATGGCAAGAGAAAACCAGACAACACAGAAGGGACAGAAGAACAGCA | |
| | GAGAAAGAATGAAGAGAATCGAAGAAGGAATCAAGGAACTGGGAAGCCAGATCCTGAAGGAACACCCGGTCGAAAACACACAGCTG | |
| | CAGAACGAAAAGCTGTACCTGTACTACCTGCAaAACGGAAGAGACATGTACGTCGACCAGGAACTGGACATCAACAGACTGAGCGA | |
| | CTACGACGTCGACCACATCGTCCCGCAGAGCTTCCTGAAGGACGACAGCATCGACAACAAGGTCCTGACAAGAAGCGACAAGAACA | |
| | GAGGAAAGAGCGACAACGTCCCGAGCGAAGAAGTCGTCAAGAAGATGAAGAACTACTGGAGACAGCTGCTGAACGCAAAGCTGATC | |
| | ACACAGAGAAAGTTCGACAACCTGACAAAGGCAGAGAGAGGAGGACTGAGCGAACTGGACAAGGCAGGATTCATCAAGAGACAGCT | |
| | GGTCGAAACAAGACAGATCACAAAGCACGTCGCACAGATCCTGGACAGCAGAATGAACACAAAGTACGACGAAAACGACAAGCTGA | |
| | TCAGAGAAGTCAAGGTCATCACACTGAAGAGCAAGCTGGTCAGCGACTTCAGAAAGGACTTCCAGTTCTACAAGGTCAGAGAAATC | |
| | AACAACTACCACCACGCACACGACGCATACCTGAACGCAGTCGTCGGAACAGCACTGATCAAGAAGTACCCGAAGCTGGAAAGCGA | |
| | ATTCGTCTACGGAGACTACAAGGTCTACGACGTCAGAAAGATGATCGCAAAGAGCGAACAGGAAATCGGAAAGGCAACAGCAAAGT | |
| | ACTTCTTCTACAGCAACATCATGAACTTCTTCAAGACAGAAATCACACTGGCAAACGGAGAAATCAGAAAGAGACCGCTGATCGAA | |
| | ACAAACGGAGAAACAGGAGAAATCGTCTGGGACAAGGGAAGAGACTTCGCAACAGTCAGAAAGGTCCTGAGCATGCCGCAGGTCAA | |
| | CATCGTCAAGAAGACAGAAGTCCAGACAGGAGGATTCAGCAAGGAAAGCATCCTGCCGAAGAGAAACAGCGACAAGCTGATCGCAA | |
| | GAAAGAAGGACTGGGACCCGAAGAAGTACGGAGGATTCGACAGCCCGACAGTCGCATACAGCGTCCTGGTCGTCGCAAAGGTCGAA | |
| | AAGGGAAAGAGCAAGAAGCTGAAGAGCGTCAAGGAACTGCTGGGAATCACAATCATGGAAAGAAGCAGCTTCGAAAAGAACCCGAT | |
| | CGACTTCCTGGAAGCAAAGGGATACAAGGAAGTCAAGAAGGACCTGATCATCAAGCTGCCGAAGTACAGCCTGTTCGAACTGGAAA | |
| | ACGGAAGAAAGAGAATGCTGGCAAGCGCAGGAGAACTGCAGAAGGGAAACGAACTGGCACTGCCGAGCAAGTACGTCAACTTCCTG | |
| | TACCTGGCAAGCCACTACGAAAAGCTGAAGGGAAGCCCGGAAGACAACGAACAGAAGCAGCTGTTCGTCGAACAGCACAAGCACTA | |
| | CCTGGACGAAATCATCGAACAGATCAGCGAATTCAGCAAGAGAGTCATCCTGGCAGACGCAAACCTGGACAAGGTCCTGAGCGCAT | |
| | ACAACAAGCACAGAGACAAGCCGATCAGAGAACAGGCAGAAAACATCATCCACCTGTTCACACTGACAAACCTGGGAGCACCGGCA | |
| | GCATTCAAGTACTTCGACACAACAATCGACAGAAAGAGATACACAAGCACAAAGGAAGTCCTGGACGCAACACTGATCCACCAGAG | |
| | CATCACAGGACTGTACGAAACAAGAATCGACCTGAGCCAGCTGGGAGGAGACGGAGGAGGAAGCCCGAAGAAGAAGAGAAAGGTCT | |
| | AGCTAGCCATCACATTTAAAAGCATCTCAGCCTACCATGAGAATAAGAGAAAGAAAATGAAGATCAATAGCTTATTCATCTCTTTT | |
| | TCTTTTTCGTTGGTGTAAAGCCAACACCCTGTCTAAAAAACATAAATTTCTTTAATCATTTTGCCTCTTTTCTCTGTGCTTCAATT | |
| | AATAAAAAATGGAAAGAACCTCGAG | |
| Cas9 ORF | ATGGACAAGAAGTACAGCATCGGCCTGGACATCGGCACCAACAGCGTGGGCTGGGCCGTGATCACCGACGAGTACAAGGTGCCCAG | 252 |
| with minimal | CAAGAAGTTCAAGGTGCTGGGCAACACCGACAGACACAGCATCAAGAAGAACCTGATCGGCGCCCTGCTGTTCGACAGCGGCGAGA | |
| uridine | CCGCCGAGGCCACCAGACTGAAGAGAACCGCCAGAAGAAGATACACCAGAAGAAAGAACAGAATCTGCTACCTGCAGGAGATCTTC | |
| codons | AGCAACGAGATGGCCAAGGTGGACGACAGCTTCTTCCACAGACTGGAGGAGAGCTTCCTGGTGGAGGAGGACAAGAAGCACGAGAG | |
| frequently | ACACCCCATCTTCGGCAACATCGTGGACGAGGTGGCCTACCACGAGAAGTACCCCACCATCTACCACCTGAGAAAGAAGCTGGTGG | |
| used in | ACAGCACCGACAAGGCCGACCTGAGACTGATCTACCTGGCCCTGGCCCACATGATCAAGTTCAGAGGCCACTTCCTGATCGAGGGC | |
| humans in | GACCTGAACCCCGACAACAGCGACGTGGACAAGCTGTTCATCCAGCTGGTGCAGACCTACAACCAGCTGTTCGAGGAGAACCCCAT | |
| general; | CAACGCCAGCGGCGTGGACGCCAAGGCCATCCTGAGCGCCAGACTGAGCAAGAGCAGAAGACTGGAGAACCTGATCGCCCAGCTGC | |
| 12.75% U | CCGGCGAGAAGAAGAACGGCCTGTTCGGCAACCTGATCGCCCTGAGCCTGGGCCTGACCCCCAACTTCAAGAGCAACTTCGACCTG | |
| content | GCCGAGGACGCCAAGCTGCAGCTGAGCAAGGACACCTACGACGACGACCTGGACAACCTGCTGGCCCAGATCGGCGACCAGTACGC | |
| | CGACCTGTTCCTGGCCGCCAAGAACCTGAGCGACGCCATCCTGCTGAGCGACATCCTGAGAGTGAACACCGAGATCACCAAGGCCC | |
| | CCCTGAGCGCCAGCATGATCAAGAGATACGACGAGCACCACCAGGACCTGACCCTGCTGAAGGCCCTGGTGAGACAGCAGCTGCCC | |
| | GAGAAGTACAAGGAGATCTTCTTCGACCAGAGCAAGAACGGCTACGCCGGCTACATCGACGGCGGCGCCAGCCAGGAGGAGTTCTA | |
| | CAAGTTCATCAAGCCCATCCTGGAGAAGATGGACGGCACCGAGGAGCTGCTGGTGAAGCTGAACAGAGAGGACCTGCTGAGAAAGC | |
| | AGAGAACCTTCGACAACGGCAGCATCCCCCACCAGATCCACCTGGGCGAGCTGCACGCCATCCTGAGAAGACAGGAGGACTTCTAC | |
| | CCCTTCCTGAAGGACAACAGAGAGAAGATCGAGAAGATCCTGACCTTCAGAATCCCCTACTACGTGGGCCCCCTGGCCAGAGGCAA | |
| | CAGCAGATTCGCCTGGATGACCAGAAAGAGCGAGGAGACCATCACCCCCTGGAACTTCGAGGAGGTGGTGGACAAGGGCGCCAGCG | |
| | CCCAGAGCTTCATCGAGAGAATGACCAACTTCGACAAGAACCTGCCCAACGAGAAGGTGCTGCCCAAGCACAGCCTGCTGTACGAG | |
| | TACTTCACCGTGTACAACGAGCTGACCAAGGTGAAGTACGTGACCGAGGGCATGAGAAAGCCCGCCTTCCTGAGCGGCGAGCAGAA | |
| | GAAGGCCATCGTGGACCTGCTGTTCAAGACCAACAGAAAGGTGACCGTGAAGCAGCTGAAGGAGGACTACTTCAAGAAGATCGAGT | |
| | GCTTCGACAGCGTGGAGATCAGCGGCGTGGAGGACAGATTCAACGCCAGCCTGGGCACCTACCACGACCTGCTGAAGATCATCAAG | |
| | GACAAGGACTTCCTGGACAACGAGGAGAACGAGGACATCCTGGAGGACATCGTGCTGACCCTGACCCTGTTCGAGGACAGAGAGAT | |
| | GATCGAGGAGAGACTGAAGACCTACGCCCACCTGTTCGACGACAAGGTGATGAAGCAGCTGAAGAGAAGAAGATACACCGGCTGGG | |
| | GCAGACTGAGCAGAAAGCTGATCAACGGCATCAGAGACAAGCAGAGCGGCAAGACCATCCTGGACTTCCTGAAGAGCGACGGCTTC | |
| | GCCAACAGAAACTTCATGCAGCTGATCCACGACGACAGCCTGACCTTCAAGGAGGACATCCAGAAGGCCCAGGTGAGCGGCCAGGG | |
| | CGACAGCCTGCACGAGCACATCGCCAACCTGGCCGGCAGCCCCGCCATCAAGAAGGGCATCCTGCAGACCGTGAAGGTGGTGGACG | |
| | AGCTGGTGAAGGTGATGGGCAGACACAAGCCCGAGAACATCGTGATCGAGATGGCCAGAGAGAACCAGACCACCCAGAAGGGCCAG | |
| | AAGAACAGCAGAGAGAGAATGAAGAGAATCGAGGAGGGCATCAAGGAGCTGGGCAGCCAGATCCTGAAGGAGCACCCCGTGGAGAA | |
| | CACCCAGCTGCAGAACGAGAAGCTGTACCTGTACTACCTGCAGAACGGCAGAGACATGTACGTGGACCAGGAGCTGGACATCAACA | |
| | GACTGAGCGACTACGACGTGGACCACATCGTGCCCCAGAGCTTCCTGAAGGACGACAGCATCGACAACAAGGTGCTGACCAGAAGC | |
| | GACAAGAACAGAGGCAAGAGCGACAACGTGCCCAGCGAGGAGGTGGTGAAGAAGATGAAGAACTACTGGAGACAGCTGCTGAACGC | |
| | CAAGCTGATCACCCAGAGAAAGTTCGACAACCTGACCAAGGCCGAGAGAGGCGGCCTGAGCGAGCTGGACAAGGCCGGCTTCATCA | |
| | AGAGACAGCTGGTGGAGACCAGACAGATCACCAAGCACGTGGCCCAGATCCTGGACAGCAGAATGAACACCAAGTACGACGAGAAC | |
| | GACAAGCTGATCAGAGAGGTGAAGGTGATCACCCTGAAGAGCAAGCTGGTGAGCGACTTCAGAAAGGACTTCCAGTTCTACAAGGT | |
| | GAGAGAGATCAACAACTACCACCACGCCCACGACGCCTACCTGAACGCCGTGGTGGGCACCGCCCTGATCAAGAAGTACCCCAAGC | |
| | TGGAGAGCGAGTTCGTGTACGGCGACTACAAGGTGTACGACGTGAGAAAGATGATCGCCAAGAGCGAGCAGGAGATCGGCAAGGCC | |
| | ACCGCCAAGTACTTCTTCTACAGCAACATCATGAACTTCTTCAAGACCGAGATCACCCTGGCCAACGGCGAGATCAGAAAGAGACC | |
| | CCTGATCGAGACCAACGGCGAGACCGGCGAGATCGTGTGGGACAAGGGCAGAGACTTCGCCACCGTGAGAAAGGTGCTGAGCATGC | |
| | CCCAGGTGAACATCGTGAAGAAGACCGAGGTGCAGACCGGCGGCTTCAGCAAGGAGAGCATCCTGCCCAAGAGAAACAGCGACAAG | |
| | CTGATCGCCAGAAAGAAGGACTGGGACCCCAAGAAGTACGGCGGCTTCGACAGCCCCACCGTGGCCTACAGCGTGCTGGTGGTGGC | |
| | CAAGGTGGAGAAGGGCAAGAGCAAGAAGCTGAAGAGCGTGAAGGAGCTGCTGGGCATCACCATCATGGAGAGAAGCAGCTTCGAGA | |
| | AGAACCCCATCGACTTCCTGGAGGCCAAGGGCTACAAGGAGGTGAAGAAGGACCTGATCATCAAGCTGCCCAAGTACAGCCTGTTC | |
| | GAGCTGGAGAACGGCAGAAAGAGAATGCTGGCCAGCGCCGGCGAGCTGCAGAAGGGCAACGAGCTGGCCCTGCCCAGCAAGTACGT | |
| | GAACTTCCTGTACCTGGCCAGCCACTACGAGAAGCTGAAGGGCAGCCCCGAGGACAACGAGCAGAAGCAGCTGTTCGTGGAGCAGC | |
| | ACAAGCACTACCTGGACGAGATCATCGAGCAGATCAGCGAGTTCAGCAAGAGAGTGATCCTGGCCGACGCCAACCTGGACAAGGTG | |
| | CTGAGCGCCTACAACAAGCACAGAGACAAGCCCATCAGAGAGCAGGCCGAGAACATCATCCACCTGTTCACCCTGACCAACCTGGG | |
| | CGCCCCCGCCGCCTTCAAGTACTTCGACACCACCATCGACAGAAAGAGATACACCAGCACCAAGGAGGTGCTGGACGCCACCCTGA | |
| | TCCACCAGAGCATCACCGGCCTGTACGAGACCAGAATCGACCTGAGCCAGCTGGGCGGCGACGGCGGCGGCAGCCCCAAGAAGAAG | |
| | AGAAAGGTGTGA | |
| Cas9 | GGGTCCCGCAGTCGGCGTCCAGCGGCTCTGCTTGTTCGTGTGTGTGTCGTTGCAGGCCTTATTCGGATCCGCCACCATGGACAAGA | 253 |
| transcript | AGTACAGCATCGGCCTGGACATCGGCACCAACAGCGTGGGCTGGGCCGTGATCACCGACGAGTACAAGGTGCCCAGCAAGAAGTTC | |
| with 5′ UTR | AAGGTGCTGGGCAACACCGACAGACACAGCATCAAGAAGAACCTGATCGGCGCCCTGCTGTTCGACAGCGGCGAGACCGCCGAGGC | |
| of HSD, ORF | CACCAGACTGAAGAGAACCGCCAGAAGAAGATACACCAGAAGAAAGAACAGAATCTGCTACCTGCAGGAGATCTTCAGCAACGAGA | |
| corresponding | TGGCCAAGGTGGACGACAGCTTCTTCCACAGACTGGAGGAGAGCTTCCTGGTGGAGGAGGACAAGAAGCACGAGAGACACCCCATC | |
| to SEQ ID | TTCGGCAACATCGTGGACGAGGTGGCCTACCACGAGAAGTACCCCACCATCTACCACCTGAGAAAGAAGCTGGTGGACAGCACCGA | |
| NO: 52, | CAAGGCCGACCTGAGACTGATCTACCTGGCCCTGGCCCACATGATCAAGTTCAGAGGCCACTTCCTGATCGAGGGCGACCTGAACC | |
| Kozak | CCGACAACAGCGACGTGGACAAGCTGTTCATCCAGCTGGTGCAGACCTACAACCAGCTGTTCGAGGAGAACCCCATCAACGCCAGC | |
| sequence, | GGCGTGGACGCCAAGGCCATCCTGAGCGCCAGACTGAGCAAGAGCAGAAGACTGGAGAACCTGATCGCCCAGCTGCCCGGCGAGAA | |
| and 3′ UTR | GAAGAACGGCCTGTTCGGCAACCTGATCGCCCTGAGCCTGGGCCTGACCCCCAACTTCAAGAGCAACTTCGACCTGGCCGAGGACG | |
| of ALB | CCAAGCTGCAGCTGAGCAAGGACACCTACGACGACGACCTGGACAACCTGCTGGCCCAGATCGGCGACCAGTACGCCGACCTGTTC | |
| | CTGGCCGCCAAGAACCTGAGCGACGCCATCCTGCTGAGCGACATCCTGAGAGTGAACACCGAGATCACCAAGGCCCCCCTGAGCGC | |
| | CAGCATGATCAAGAGATACGACGAGCACCACCAGGACCTGACCCTGCTGAAGGCCCTGGTGAGACAGCAGCTGCCCGAGAAGTACA | |
| | AGGAGATCTTCTTCGACCAGAGCAAGAACGGCTACGCCGGCTACATCGACGGCGGCGCCAGCCAGGAGGAGTTCTACAAGTTCATC | |
| | AAGCCCATCCTGGAGAAGATGGACGGCACCGAGGAGCTGCTGGTGAAGCTGAACAGAGAGGACCTGCTGAGAAAGCAGAGAACCTT | |
| | CGACAACGGCAGCATCCCCCACCAGATCCACCTGGGCGAGCTGCACGCCATCCTGAGAAGACAGGAGGACTTCTACCCCTTCCTGA | |
| | AGGACAACAGAGAGAAGATCGAGAAGATCCTGACCTTCAGAATCCCCTACTACGTGGGCCCCCTGGCCAGAGGCAACAGCAGATTC | |
| | GCCTGGATGACCAGAAAGAGCGAGGAGACCATCACCCCCTGGAACTTCGAGGAGGTGGTGGACAAGGGCGCCAGCGCCCAGAGCTT | |
| | CATCGAGAGAATGACCAACTTCGACAAGAACCTGCCCAACGAGAAGGTGCTGCCCAAGCACAGCCTGCTGTACGAGTACTTCACCG | |
| | TGTACAACGAGCTGACCAAGGTGAAGTACGTGACCGAGGGCATGAGAAAGCCCGCCTTCCTGAGCGGCGAGCAGAAGAAGGCCATC | |
| | GTGGACCTGCTGTTCAAGACCAACAGAAAGGTGACCGTGAAGCAGCTGAAGGAGGACTACTTCAAGAAGATCGAGTGCTTCGACAG | |
| | CGTGGAGATCAGCGGCGTGGAGGACAGATTCAACGCCAGCCTGGGCACCTACCACGACCTGCTGAAGATCATCAAGGACAAGGACT | |
| | TCCTGGACAACGAGGAGAACGAGGACATCCTGGAGGACATCGTGCTGACCCTGACCCTGTTCGAGGACAGAGAGATGATCGAGGAG | |
| | AGACTGAAGACCTACGCCCACCTGTTCGACGACAAGGTGATGAAGCAGCTGAAGAGAAGAAGATACACCGGCTGGGGCAGACTGAG | |
| | CAGAAAGCTGATCAACGGCATCAGAGACAAGCAGAGCGGCAAGACCATCCTGGACTTCCTGAAGAGCGACGGCTTCGCCAACAGAA | |
| | ACTTCATGCAGCTGATCCACGACGACAGCCTGACCTTCAAGGAGGACATCCAGAAGGCCCAGGTGAGCGGCCAGGGCGACAGCCTG | |
| | CACGAGCACATCGCCAACCTGGCCGGCAGCCCCGCCATCAAGAAGGGCATCCTGCAGACCGTGAAGGTGGTGGACGAGCTGGTGAA | |
| | GGTGATGGGCAGACACAAGCCCGAGAACATCGTGATCGAGATGGCCAGAGAGAACCAGACCACCCAGAAGGGCCAGAAGAACAGCA | |
| | GAGAGAGAATGAAGAGAATCGAGGAGGGCATCAAGGAGCTGGGCAGCCAGATCCTGAAGGAGCACCCCGTGGAGAACACCCAGCTG | |
| | CAGAACGAGAAGCTGTACCTGTACTACCTGCAGAACGGCAGAGACATGTACGTGGACCAGGAGCTGGACATCAACAGACTGAGCGA | |
| | CTACGACGTGGACCACATCGTGCCCCAGAGCTTCCTGAAGGACGACAGCATCGACAACAAGGTGCTGACCAGAAGCGACAAGAACA | |
| | GAGGCAAGAGCGACAACGTGCCCAGCGAGGAGGTGGTGAAGAAGATGAAGAACTACTGGAGACAGCTGCTGAACGCCAAGCTGATC | |
| | ACCCAGAGAAAGTTCGACAACCTGACCAAGGCCGAGAGAGGCGGCCTGAGCGAGCTGGACAAGGCCGGCTTCATCAAGAGACAGCT | |
| | GGTGGAGACCAGACAGATCACCAAGCACGTGGCCCAGATCCTGGACAGCAGAATGAACACCAAGTACGACGAGAACGACAAGCTGA | |
| | TCAGAGAGGTGAAGGTGATCACCCTGAAGAGCAAGCTGGTGAGCGACTTCAGAAAGGACTTCCAGTTCTACAAGGTGAGAGAGATC | |
| | AACAACTACCACCACGCCCACGACGCCTACCTGAACGCCGTGGTGGGCACCGCCCTGATCAAGAAGTACCCCAAGCTGGAGAGCGA | |
| | GTTCGTGTACGGCGACTACAAGGTGTACGACGTGAGAAAGATGATCGCCAAGAGCGAGCAGGAGATCGGCAAGGCCACCGCCAAGT | |
| | ACTTCTTCTACAGCAACATCATGAACTTCTTCAAGACCGAGATCACCCTGGCCAACGGCGAGATCAGAAAGAGACCCCTGATCGAG | |
| | ACCAACGGCGAGACCGGCGAGATCGTGTGGGACAAGGGCAGAGACTTCGCCACCGTGAGAAAGGTGCTGAGCATGCCCCAGGTGAA | |
| | CATCGTGAAGAAGACCGAGGTGCAGACCGGCGGCTTCAGCAAGGAGAGCATCCTGCCCAAGAGAAACAGCGACAAGCTGATCGCCA | |
| | GAAAGAAGGACTGGGACCCCAAGAAGTACGGCGGCTTCGACAGCCCCACCGTGGCCTACAGCGTGCTGGTGGTGGCCAAGGTGGAG | |
| | AAGGGCAAGAGCAAGAAGCTGAAGAGCGTGAAGGAGCTGCTGGGCATCACCATCATGGAGAGAAGCAGCTTCGAGAAGAACCCCAT | |
| | CGACTTCCTGGAGGCCAAGGGCTACAAGGAGGTGAAGAAGGACCTGATCATCAAGCTGCCCAAGTACAGCCTGTTCGAGCTGGAGA | |
| | ACGGCAGAAAGAGAATGCTGGCCAGCGCCGGCGAGCTGCAGAAGGGCAACGAGCTGGCCCTGCCCAGCAAGTACGTGAACTTCCTG | |
| | TACCTGGCCAGCCACTACGAGAAGCTGAAGGGCAGCCCCGAGGACAACGAGCAGAAGCAGCTGTTCGTGGAGCAGCACAAGCACTA | |
| | CCTGGACGAGATCATCGAGCAGATCAGCGAGTTCAGCAAGAGAGTGATCCTGGCCGACGCCAACCTGGACAAGGTGCTGAGCGCCT | |
| | ACAACAAGCACAGAGACAAGCCCATCAGAGAGCAGGCCGAGAACATCATCCACCTGTTCACCCTGACCAACCTGGGCGCCCCCGCC | |
| | GCCTTCAAGTACTTCGACACCACCATCGACAGAAAGAGATACACCAGCACCAAGGAGGTGCTGGACGCCACCCTGATCCACCAGAG | |
| | CATCACCGGCCTGTACGAGACCAGAATCGACCTGAGCCAGCTGGGCGGCGACGGCGGCGGCAGCCCCAAGAAGAAGAGAAAGGTGT | |
| | GACTAGCCATCACATTTAAAAGCATCTCAGCCTACCATGAGAATAAGAGAAAGAAAATGAAGATCAATAGCTTATTCATCTCTTTT | |
| | TCTTTTTCGTTGGTGTAAAGCCAACACCCTGTCTAAAAAACATAAATTTCTTTAATCATTTTGCCTCTTTTCTCTGTGCTTCAATT | |
| | AATAAAAAATGGAAAGAACCTCGAG | |
| Cas9 ORF | ATGGACAAAAAATACAGCATAGGGCTAGACATAGGGACGAACAGCGTAGGGTGGGCGGTAATAACGGACGAATACAAAGTACCGAG | 254 |
| with minimal | CAAAAAATTCAAAGTACTAGGGAACACGGACCGACACAGCATAAAAAAAAACCTAATAGGGGCGCTACTATTCGACAGCGGGGAAA | |
| uridine | CGGCGGAAGCGACGCGACTAAAACGAACGGCGCGACGACGATACACGCGACGAAAAAACCGAATATGCTACCTACAAGAAATATTC | |
| codons | AGCAACGAAATGGCGAAAGTAGACGACAGCTTCTTCCACCGACTAGAAGAAAGCTTCCTAGTAGAAGAAGACAAAAAACACGAACG | |
| infrequently | ACACCCGATATTCGGGAACATAGTAGACGAAGTAGCGTACCACGAAAAATACCCGACGATATACCACCTACGAAAAAAACTAGTAG | |
| used in | ACAGCACGGACAAAGCGGACCTACGACTAATATACCTAGCGCTAGCGCACATGATAAAATTCCGAGGGCACTTCCTAATAGAAGGG | |
| humans in | GACCTAAACCCGGACAACAGCGACGTAGACAAACTATTCATACAACTAGTACAAACGTACAACCAACTATTCGAAGAAAACCCGAT | |
| general; | AAACGCGAGCGGGGTAGACGCGAAAGCGATACTAAGCGCGCGACTAAGCAAAAGCCGACGACTAGAAAACCTAATAGCGCAACTAC | |
| 12.75% U | CGGGGGAAAAAAAAAACGGGCTATTCGGGAACCTAATAGCGCTAAGCCTAGGGCTAACGCCGAACTTCAAAAGCAACTTCGACCTA | |
| content | GCGGAAGACGCGAAACTACAACTAAGCAAAGACACGTACGACGACGACCTAGACAACCTACTAGCGCAAATAGGGGACCAATACGC | |
| | GGACCTATTCCTAGCGGCGAAAAACCTAAGCGACGCGATACTACTAAGCGACATACTACGAGTAAACACGGAAATAACGAAAGCGC | |
| | CGCTAAGCGCGAGCATGATAAAACGATACGACGAACACCACCAAGACCTAACGCTACTAAAAGCGCTAGTACGACAACAACTACCG | |
| | GAAAAATACAAAGAAATATTCTTCGACCAAAGCAAAAACGGGTACGCGGGGTACATAGACGGGGGGGCGAGCCAAGAAGAATTCTA | |
| | CAAATTCATAAAACCGATACTAGAAAAAATGGACGGGACGGAAGAACTACTAGTAAAACTAAACCGAGAAGACCTACTACGAAAAC | |
| | AACGAACGTTCGACAACGGGAGCATACCGCACCAAATACACCTAGGGGAACTACACGCGATACTACGACGACAAGAAGACTTCTAC | |
| | CCGTTCCTAAAAGACAACCGAGAAAAAATAGAAAAAATACTAACGTTCCGAATACCGTACTACGTAGGGCCGCTAGCGCGAGGGAA | |
| | CAGCCGATTCGCGTGGATGACGCGAAAAAGCGAAGAAACGATAACGCCGTGGAACTTCGAAGAAGTAGTAGACAAAGGGGCGAGCG | |
| | CGCAAAGCTTCATAGAACGAATGACGAACTTCGACAAAAACCTACCGAACGAAAAAGTACTACCGAAACACAGCCTACTATACGAA | |
| | TACTTCACGGTATACAACGAACTAACGAAAGTAAAATACGTAACGGAAGGGATGCGAAAACCGGCGTTCCTAAGCGGGGAACAAAA | |
| | AAAAGCGATAGTAGACCTACTATTCAAAACGAACCGAAAAGTAACGGTAAAACAACTAAAAGAAGACTACTTCAAAAAAATAGAAT | |
| | GCTTCGACAGCGTAGAAATAAGCGGGGTAGAAGACCGATTCAACGCGAGCCTAGGGACGTACCACGACCTACTAAAAATAATAAAA | |
| | GACAAAGACTTCCTAGACAACGAAGAAAACGAAGACATACTAGAAGACATAGTACTAACGCTAACGCTATTCGAAGACCGAGAAAT | |
| | GATAGAAGAACGACTAAAAACGTACGCGCACCTATTCGACGACAAAGTAATGAAACAACTAAAACGACGACGATACACGGGGTGGG | |
| | GGCGACTAAGCCGAAAACTAATAAACGGGATACGAGACAAACAAAGCGGGAAAACGATACTAGACTTCCTAAAAAGCGACGGGTTC | |
| | GCGAACCGAAACTTCATGCAACTAATACACGACGACAGCCTAACGTTCAAAGAAGACATACAAAAAGCGCAAGTAAGCGGGCAAGG | |
| | GGACAGCCTACACGAACACATAGCGAACCTAGCGGGGAGCCCGGCGATAAAAAAAGGGATACTACAAACGGTAAAAGTAGTAGACG | |
| | AACTAGTAAAAGTAATGGGGCGACACAAACCGGAAAAGATAGTAATAGAAATGGCGCGAGAAAACCAAACGACGCAAAAAGGGCAA | |
| | AAAAACAGCCGAGAACGAATGAAACGIATAGAAGAAGGGATAAAAGAACTAGGGAGCCAAATACTAAAAGAACACCCGGTAGAAAA | |
| | CACGCAACTACAAAACGAAAAACTATACCTATACTACCTACAAAACGGGCGAGACATGTACGTAGACCAAGAACTAGACATAAACC | |
| | GACTAAGCGACTACGACGTAGACCACATAGTACCGCAAAGCTTCCTAAAAGACGACAGCATAGACAACAAAGTACTAACGCGAAGC | |
| | GACAAAAACCGAGGGAAAAGCGACAACGTACCGAGCGAAGAAGTAGTAAAAAAAATGAAAAACTACTGGCGACAACTACTAAACGC | |
| | GAAACTAATAACGCAACGAAAATTCGACAACCTAACGAAAGCGGAACGAGGGGGGCTAAGCGAACTAGACAAAGCGGGGTTCATAA | |
| | AACGACAACTAGTAGAAACGCGACAAATAACGAAACACGTAGCGCAAATACTAGACAGCCGAATGAACACGAAATACGACGAAAAC | |
| | GACAAACTAATACGAGAAGTAAAAGTAATAACGCTAAAAAGCAAACTAGTAAGCGACTTCCGAAAAGACTTCCAATTCTACAAAGT | |
| | ACGAGAAATAAACAACTACCACCACGCGCACGACGCGTACCTAAACGCGGTAGTAGGGACGGCGCTAATAAAAAAATACCCGAAAC | |
| | TAGAAAGCGAATTCGTATACGGGGACTACAAAGTATACGACGTACGAAAAATGATAGCGAAAAGCGAACAAGAAATAGGGAAAGCG | |
| | ACGGCGAAATACTTCTTCTACAGCAACATAATGAACTTCTTCAAAACGGAAATAACGCTAGCGAACGGGGAAATACGAAAACGACC | |
| | GCTAATAGAAACGAACGGGGAAACGGGGGAAATAGTATGGGACAAAGGGCGAGACTTCGCGACGGTACGAAAAGTACTAAGCATGC | |
| | CGCAAGTAAACATAGTAAAAAAAACGGAAGTACAAACGGGGGGGTTCAGCAAAGAAAGCATACTACCGAAACGAAACAGCGACAAA | |
| | CTAATAGCGCGAAAAAAAGACTGGGACCCGAAAAAATACGGGGGGTTCGACAGCCCGACGGTAGCGTACAGCGTACTAGTAGTAGC | |
| | GAAAGTAGAAAAAGGGAAAAGCAAAAAACTAAAAAGCGTAAAAGAACTACTAGGGATAACGATAATGGAACGAAGCAGCTTCGAAA | |
| | AAAACCCGATAGACTTCCTAGAAGCGAAAGGGTACAAAGAAGTAAAAAAAGACCTAATAATAAAACTACCGAAATACAGCCTATTC | |
| | GAACTAGAAAACGGGCGAAAACGAATGCTAGCGAGCGCGGGGGAACTACAAAAAGGGAACGAACTAGCGCTACCGAGCAAATACGT | |
| | AAACTTCCTATACCTAGCGAGCCACTACGAAAAACTAAAAGGGAGCCCGGAAGACAACGAACAAAAACAACTATTCGTAGAACAAC | |
| | ACAAACACTACCTAGACGAAATAATAGAACAAATAAGCGAATTCAGCAAACGAGTAATACTAGCGGACGCGAACCTAGACAAAGTA | |
| | CTAAGCGCGTACAACAAACACCGAGACAAACCGATACGAGAACAAGCGGAAAAGATAATACACCTATTCACGCTAACGAACCTAGG | |
| | GGCGCCGGCGGCGTTCAAATACTTCGACACGACGATAGACCGAAAACGATACACGAGCACGAAAGAAGTACTAGACGCGACGCTAA | |
| | TACACCAAAGCATAACGGGGCTATACGAAACGCGAATAGACCTAAGCCAACTAGGGGGGGACGGGGGGGGGAGCCCGAAAAAAAAA | |
| | CGAAAAGTATGA | |
| Cas9 | GGGTCCCGCAGTCGGCGTCCAGCGGCTCTGCTTGTTCGTGTGTGTGTCGTTGCAGGCCTTATTCGGATCCGCCACCATGGACAAAA | 255 |
| transcript | AATACAGCATAGGGCTAGACATAGGGACGAACAGCGTAGGGTGGGCGGTAATAACGGACGAATACAAAGTACCGAGCAAAAAATTC | |
| with 5′ UTR | AAAGTACTAGGGAACACGGACCGACACAGCATAAAAAAAAACCTAATAGGGGCGCTACTATTCGACAGCGGGGAAACGGCGGAAGC | |
| of HSD, ORF | GACGCGACTAAAACGAACGGCGCGACGACGATACACGCGACGAAAAAACCGAATATGCTACCTACAAGAAATATTCAGCAACGAAA | |
| corresponding | TGGCGAAAGTAGACGACAGCTTCTTCCACCGACTAGAAGAAAGCTTCCTAGTAGAAGAAGACAAAAAACACGAACGACACCCGATA | |
| to SEQ ID | TTCGGGAACATAGTAGACGAAGTAGCGTACCACGAAAAATACCCGACGATATACCACCTACGAAAAAAACTAGTAGACAGCACGGA | |
| NO: 54, | CAAAGCGGACCTACGACTAATATACCTAGCGCTAGCGCACATGATAAAATTCCGAGGGCACTTCCTAATAGAAGGGGACCTAAACC | |
| Kozak | CGGACAACAGCGACGTAGACAAACTATTCATACAACTAGTACAAACGTACAACCAACTATTCGAAGAAAACCCGATAAACGCGAGC | |
| sequence, | GGGGTAGACGCGAAAGCGATACTAAGCGCGCGACTAAGCAAAAGCCGACGACTAGAAAACCTAATAGCGCAACTACCGGGGGAAAA | |
| and 3′ UTR | AAAAAACGGGCTATTCGGGAACCTAATAGCGCTAAGCCTAGGGCTAACGCCGAACTTCAAAAGCAACTTCGACCTAGCGGAAGACG | |
| of ALB | CGAAACTACAACTAAGCAAAGACACGTACGACGACGACCTAGACAACCTACTAGCGCAAATAGGGGACCAATACGCGGACCTATTC | |
| | CTAGCGGCGAAAAACCTAAGCGACGCGATACTACTAAGCGACATACTACGAGTAAACACGGAAATAACGAAAGCGCCGCTAAGCGC | |
| | GAGCATGATAAAACGATACGACGAACACCACCAAGACCTAACGCTACTAAAAGCGCTAGTACGACAACAACTACCGGAAAAATACA | |
| | AAGAAATATTCTTCGACCAAAGCAAAAACGGGTACGCGGGGTACATAGACGGGGGGGCGAGCCAAGAAGAATTCTACAAATTCATA | |
| | AAACCGATACTAGAAAAAATGGACGGGACGGAAGAACTACTAGTAAAACTAAACCGAGAAGACCTACTACGAAAACAACGAACGTT | |
| | CGACAACGGGAGCATACCGCACCAAATACACCTAGGGGAACTACACGCGATACTACGACGACAAGAAGACTTCTACCCGTTCCTAA | |
| | AAGACAACCGAGAAAAAATAGAAAAAATACTAACGTTCCGAATACCGTACTACGTAGGGCCGCTAGCGCGAGGGAACAGCCGATTC | |
| | GCGTGGATGACGCGAAAAAGCGAAGAAACGATAACGCCGTGGAACTTCGAAGAAGTAGTAGACAAAGGGGCGAGCGCGCAAAGCTT | |
| | CATAGAACGAATGACGAACTTCGACAAAAACCTACCGAACGAAAAAGTACTACCGAAACACAGCCTACTATACGAATACTTCACGG | |
| | TATACAACGAACTAACGAAAGTAAAATACGTAACGGAAGGGATGCGAAAACCGGCGTTCCTAAGCGGGGAACAAAAAAAAGCGATA | |
| | GTAGACCTACTATTCAAAACGAACCGAAAAGTAACGGTAAAACAACTAAAAGAAGACTACTTCAAAAAAATAGAATGCTTCGACAG | |
| | CGTAGAAATAAGCGGGGTAGAAGACCGATTCAACGCGAGCCTAGGGACGTACCACGACCTACTAAAAATAATAAAAGACAAAGACT | |
| | TCCTAGACAACGAAGAAAACGAAGACATACTAGAAGACATAGTACTAACGCTAACGCTATTCGAAGACCGAGAAATGATAGAAGAA | |
| | CGACTAAAAACGTACGCGCACCTATTCGACGACAAAGTAATGAAACAACTAAAACGACGACGATACACGGGGTGGGGGCGACTAAG | |
| | CCGAAAACTAATAAACGGGATACGAGACAAACAAAGCGGGAAAACGATACTAGACTTCCTAAAAAGCGACGGGTTCGCGAACCGAA | |
| | ACTTCATGCAACTAATACACGACGACAGCCTAACGTTCAAAGAAGACATACAAAAAGCGCAAGTAAGCGGGCAAGGGGACAGCCTA | |
| | CACGAACACATAGCGAACCTAGCGGGGAGCCCGGCGATAAAAAAAGGGATACTACAAACGGTAAAAGTAGTAGACGAACTAGTAAA | |
| | AGTAATGGGGCGACACAAACCGGAAAACATAGTAATAGAAATGGCGCGAGAAAACCAAACGACGCAAAAAGGGCAAAAAAACAGCC | |
| | GAGAACGAATGAAACGAATAGAAGAAGGGATAAAAGAACTAGGGAGCCAAATACTAAAAGAACACCCGGTAGAAAACACGCAACTA | |
| | CAAAACGAAAAACTATACCTATACTACCTACAAAACGGGCGAGACATGTACGTAGACCAAGAACTAGACATAAACCGACTAAGCGA | |
| | CTACGACGTAGACCACATAGTACCGCAAAGCTTCCTAAAAGACGACAGCATAGACAACAAAGTACTAACGCGAAGCGACAAAAACC | |
| | GAGGGAAAAGCGACAACGTACCGAGCGAAGAAGTAGTAAAAAAAATGAAAAACTACTGGCGACAACTACTAAACGCGAAACTAATA | |
| | ACGCAACGAAAATTCGACAACCTAACGAAAGCGGAACGAGGGGGGCTAAGCGAACTAGACAAAGCGGGGTTCATAAAACGACAACT | |
| | AGTAGAAACGCGACAAATAACGAAACACGTAGCGCAAATACTAGACAGCCGAATGAACACGAAATACGACGAAAACGACAAACTAA | |
| | TACGAGAAGTAAAAGTAATAACGCTAAAAAGCAAACTAGTAAGCGACTTCCGAAAAGACTTCCAATTCTACAAAGTACGAGAAATA | |
| | AACAACTACCACCACGCGCACGACGCGTACCTAAACGCGGTAGTAGGGACGGCGCTAATAAAAAAATACCCGAAACTAGAAAGCGA | |
| | ATTCGTATACGGGGACTACAAAGTATACGACGTACGAAAAATGATAGCGAAAAGCGAACAAGAAATAGGGAAAGCGACGGCGAAAT | |
| | ACTTCTTCTACAGCAACATAATGAACTTCTTCAAAACGGAAATAACGCTAGCGAACGGGGAAATACGAAAACGACCGCTAATAGAA | |
| | ACGAACGGGGAAACGGGGGAAATAGTATGGGACAAAGGGCGAGACTTCGCGACGGTACGAAAAGTACTAAGCATGCCGCAAGTAAA | |
| | CATAGTAAAAAAAACGGAAGTACAAACGGGGGGGTTCAGCAAAGAAAGCATACTACCGAAACGAAACAGCGACAAACTAATAGCGC | |
| | GAAAAAAAGACTGGGACCCGAAAAAATACGGGGGGTTCGACAGCCCGACGGTAGCGTACAGCGTACTAGTAGTAGCGAAAGTAGAA | |
| | AAAGGGAAAAGCAAAAAACTAAAAAGCGTAAAAGAACTACTAGGGATAACGATAATGGAACGAAGCAGCTTCGAAAAAAACCCGAT | |
| | AGACTTCCTAGAAGCGAAAGGGTACAAAGAAGTAAAAAAAGACCTAATAATAAAACTACCGAAATACAGCCTATTCGAACTAGAAA | |
| | ACGGGCGAAAACGAATGCTAGCGAGCGCGGGGGAACTACAAAAAGGGAACGAACTAGCGCTACCGAGCAAATACGTAAACTTCCTA | |
| | TACCTAGCGAGCCACTACGAAAAACTAAAAGGGAGCCCGGAAGACAACGAACAAAAACAACTATTCGTAGAACAACACAAACACTA | |
| | CCTAGACGAAATAATAGAACAAATAAGCGAATTCAGCAAACGAGTAATACTAGCGGACGCGAACCTAGACAAAGTACTAAGCGCGT | |
| | ACAACAAACACCGAGACAAACCGATACGAGAACAAGCGGAAAACATAATACACCTATTCACGCTAACGAACCTAGGGGCGCCGGCG | |
| | GCGTTCAAATACTTCGACACGACGATAGACCGAAAACGATACACGAGCACGAAAGAAGTACTAGACGCGACGCTAATACACCAAAG | |
| | CATAACGGGGCTATACGAAACGCGAATAGACCTAAGCCAACTAGGGGGGGACGGGGGGGGGAGCCCGAAAAAAAAACGAAAAGTAT | |
| | GACTAGCCATCACATTTAAAAGCATCTCAGCCTACCATGAGAATAAGAGAAAGAAAATGAAGATCAATAGCTTATTCATCTCTTTT | |
| | TCTTTTTCGTTGGTGTAAAGCCAACACCCTGTCTAAAAAACATAAATTTCTTTAATCATTTTGCCTCTTTTCTCTGTGCTTCAATT | |
| | AATAAAAAATGGAAAGAACCTCGAG | |
| Cas9 | AGGTCCCGCAGTCGGCGTCCAGCGGCTCTGCTTGTTCGTGTGTGTGTCGTTGCAGGCCTTATTCGGATCCGCCACCATGGACAAGA | 256 |
| transcript | AGTACAGCATCGGACTGGACATCGGAACAAACAGCGTCGGATGGGCAGTCATCACAGACGAATACAAGGTCCCGAGCAAGAAGTTC | |
| with AGG as | AAGGTCCTGGGAAACACAGACAGACACAGCATCAAGAAGAACCTGATCGGAGCACTGCTGTTCGACAGCGGAGAAACAGCAGAAGC | |
| first three | AACAAGACTGAAGAGAACAGCAAGAAGAAGATACACAAGAAGAAAGAACAGAATCTGCTACCTGCAGGAAATCTTCAGCAACGAAA | |
| nucleotides | TGGCAAAGGTCGACGACAGCTTCTTCCACAGACTGGAAGAAAGCTTCCTGGTCGAAGAAGACAAGAAGCACGAAAGACACCCGATC | |
| for use with | TTCGGAAACATCGTCGACGAAGTCGCATACCACGAAAAGTACCCGACAATCTACCACCTGAGAAAGAAGCTGGTCGACAGCACAGA | |
| CleanCap™, | CAAGGCAGACCTGAGACTGATCTACCTGGCACTGGCACACATGATCAAGTTCAGAGGACACTTCCTGATCGAAGGAGACCTGAACC | |
| 5′ UTR of | CGGACAACAGCGACGTCGACAAGCTGTTCATCCAGCTGGTCCAGACATACAACCAGCTGTTCGAAGAAAACCCGATCAACGCAAGC | |
| HSD, ORF | GGAGTCGACGCAAAGGCAATCCTGAGCGCAAGACTGAGCAAGAGCAGAAGACTGGAAAACCTGATCGCACAGCTGCCGGGAGAAAA | |
| corresponding | GAAGAACGGACTGTTCGGAAACCTGATCGCACTGAGCCTGGGACTGACACCGAACTTCAAGAGCAACTTCGACCTGGCAGAAGACG | |
| to SEQ ID | CAAAGCTGCAGCTGAGCAAGGACACATACGACGACGACCTGGACAACCTGCTGGCACAGATCGGAGACCAGTACGCAGACCTGTTC | |
| NO: 4, Kozak | CTGGCAGCAAAGAACCTGAGCGACGCAATCCTGCTGAGCGACATCCTGAGAGTCAACACAGAAATCACAAAGGCACCGCTGAGCGC | |
| sequence, | AAGCATGATCAAGAGATACGACGAACACCACCAGGACCTGACACTGCTGAAGGCACTGGTCAGACAGCAGCTGCCGGAAAAGTACA | |
| and 3′ UTR | AGGAAATCTTCTTCGACCAGAGCAAGAACGGATACGCAGGATACATCGACGGAGGAGCAAGCCAGGAAGAATTCTACAAGTTCATC | |
| of ALB | AAGCCGATCCTGGAAAAGATGGACGGAACAGAAGAACTGCTGGTCAAGCTGAACAGAGAAGACCTGCTGAGAAAGCAGAGAACATT | |
| | CGACAACGGAAGCATCCCGCACCAGATCCACCTGGGAGAACTGCACGCAATCCTGAGAAGACAGGAAGACTTCTACCCGTTCCTGA | |
| | AGGACAACAGAGAAAAGATCGAAAAGATCCTGACATTCAGAATCCCGTACTACGTCGGACCGCTGGCAAGAGGAAACAGCAGATTC | |
| | GCATGGATGACAAGAAAGAGCGAAGAAACAATCACACCGTGGAACTTCGAAGAAGTCGTCGACAAGGGAGCAAGCGCACAGAGCTT | |
| | CATCGAAAGAATGACAAACTTCGACAAGAACCTGCCGAACGAAAAGGTCCTGCCGAAGCACAGCCTGCTGTACGAATACTTCACAG | |
| | TCTACAACGAACTGACAAAGGTCAAGTACGTCACAGAAGGAATGAGAAAGCCGGCATTCCTGAGCGGAGAACAGAAGAAGGCAATC | |
| | GTCGACCTGCTGTTCAAGACAAACAGAAAGGTCACAGTCAAGCAGCTGAAGGAAGACTACTTCAAGAAGATCGAATGCTTCGACAG | |
| | CGTCGAAATCAGCGGAGTCGAAGACAGATTCAACGCAAGCCTGGGAACATACCACGACCTGCTGAAGATCATCAAGGACAAGGACT | |
| | TCCTGGACAACGAAGAAAACGAAGACATCCTGGAAGACATCGTCCTGACACTGACACTGTTCGAAGACAGAGAAATGATCGAAGAA | |
| | AGACTGAAGACATACGCACACCTGTTCGACGACAAGGTCATGAAGCAGCTGAAGAGAAGAAGATACACAGGATGGGGAAGACTGAG | |
| | CAGAAAGCTGATCAACGGAATCAGAGACAAGCAGAGCGGAAAGACAATCCTGGACTTCCTGAAGAGCGACGGATTCGCAAACAGAA | |
| | ACTTCATGCAGCTGATCCACGACGACAGCCTGACATTCAAGGAAGACATCCAGAAGGCACAGGTCAGCGGACAGGGAGACAGCCTG | |
| | CACGAACACATCGCAAACCTGGCAGGAAGCCCGGCAATCAAGAAGGGAATCCTGCAGACAGTCAAGGTCGTCGACGAACTGGTCAA | |
| | GGTCATGGGAAGACACAAGCCGGAAAACATCGTCATCGAAATGGCAAGAGAAAACCAGACAACACAGAAGGGACAGAAGAACAGCA | |
| | GAGAAAGAATGAAGAGAATCGAAGAAGGAATCAAGGAACTGGGAAGCCAGATCCTGAAGGAACACCCGGTCGAAAACACACAGCTG | |
| | CAGAACGAAAAGCTGTACCTGTACTACCTGCAGAACGGAAGAGACATGTACGTCGACCAGGAACTGGACATCAACAGACTGAGCGA | |
| | CTACGACGTCGACCACATCGTCCCGCAGAGCTTCCTGAAGGACGACAGCATCGACAACAAGGTCCTGACAAGAAGCGACAAGAACA | |
| | GAGGAAAGAGCGACAACGTCCCGAGCGAAGAAGTCGTCAAGAAGATGAAGAACTACTGGAGACAGCTGCTGAACGCAAAGCTGATC | |
| | ACACAGAGAAAGTTCGACAACCTGACAAAGGCAGAGAGAGGAGGACTGAGCGAACTGGACAAGGCAGGATTCATCAAGAGACAGCT | |
| | GGTCGAAACAAGACAGATCACAAAGCACGTCGCACAGATCCTGGACAGCAGAATGAACACAAAGTACGACGAAAACGACAAGCTGA | |
| | TCAGAGAAGTCAAGGTCATCACACTGAAGAGCAAGCTGGTCAGCGACTTCAGAAAGGACTTCCAGTTCTACAAGGTCAGAGAAATC | |
| | AACAACTACCACCACGCACACGACGCATACCTGAACGCAGTCGTCGGAACAGCACTGATCAAGAAGTACCCGAAGCTGGAAAGCGA | |
| | ATTCGTCTACGGAGACTACAAGGTCTACGACGTCAGAAAGATGATCGCAAAGAGCGAACAGGAAATCGGAAAGGCAACAGCAAAGT | |
| | ACTTCTTCTACAGCAACATCATGAACTTCTTCAAGACAGAAATCACACTGGCAAACGGAGAAATCAGAAAGAGACCGCTGATCGAA | |
| | ACAAACGGAGAAACAGGAGAAATCGTCTGGGACAAGGGAAGAGACTTCGCAACAGTCAGAAAGGTCCTGAGCATGCCGCAGGTCAA | |
| | CATCGTCAAGAAGACAGAAGTCCAGACAGGAGGATTCAGCAAGGAAAGCATCCTGCCGAAGAGAAACAGCGACAAGCTGATCGCAA | |
| | GAAAGAAGGACTGGGACCCGAAGAAGTACGGAGGATTCGACAGCCCGACAGTCGCATACAGCGTCCTGGTCGTCGCAAAGGTCGAA | |
| | AAGGGAAAGAGCAAGAAGCTGAAGAGCGTCAAGGAACTGCTGGGAATCACAATCATGGAAAGAAGCAGCTTCGAAAAGAACCCGAT | |
| | CGACTTCCTGGAAGCAAAGGGATACAAGGAAGTCAAGAAGGACCTGATCATCAAGCTGCCGAAGTACAGCCTGTTCGAACTGGAAA | |
| | ACGGAAGAAAGAGAATGCTGGCAAGCGCAGGAGAACTGCAGAAGGGAAACGAACTGGCACTGCCGAGCAAGTACGTCAACTTCCTG | |
| | TACCTGGCAAGCCACTACGAAAAGCTGAAGGGAAGCCCGGAAGACAACGAACAGAAGCAGCTGTTCGTCGAACAGCACAAGCACTA | |
| | CCTGGACGAAATCATCGAACAGATCAGCGAATTCAGCAAGAGAGTCATCCTGGCAGACGCAAACCTGGACAAGGTCCTGAGCGCAT | |
| | ACAACAAGCACAGAGACAAGCCGATCAGAGAACAGGCAGAAAACATCATCCACCTGTTCACACTGACAAACCTGGGAGCACCGGCA | |
| | GCATTCAAGTACTTCGACACAACAATCGACAGAAAGAGATACACAAGCACAAAGGAAGTCCTGGACGCAACACTGATCCACCAGAG | |
| | CATCACAGGACTGTACGAAACAAGAATCGACCTGAGCCAGCTGGGAGGAGACGGAGGAGGAAGCCCGAAGAAGAAGAGAAAGGTCT | |
| | AGCTAGCCATCACATTTAAAAGCATCTCAGCCTACCATGAGAATAAGAGAAAGAAAATGAAGATCAATAGCTTATTCATCTCTTTT | |
| | TCTTTTTCGTTGGTGTAAAGCCAACACCCTGTCTAAAAAACATAAATTTCTTTAATCATTTTGCCTCTTTTCTCTGTGCTTCAATT | |
| | AATAAAAAATGGAAAGAACCTCGAG | |
| Cas9 | GGGCAGATCGCCTGGAGACGCCATCCACGCTGTTTTGACCTCCATAGAAGACACCGGGACCGATCCAGCCTCCGCGGCCGGGAACG | 257 |
| transcript | GTGCATTGGAACGCGGATTCCCCGTGCCAAGAGTGACTCACCGTCCTTGACACGGCCACCATGGACAAGAAGTACAGCATCGGACT | |
| with 5′ UTR | GGACATCGGAACAAACAGCGTCGGATGGGCAGTCATCACAGACGAATACAAGGTCCCGAGCAAGAAGTTCAAGGTCCTGGGAAACA | |
| from CMV, ORF | CAGACAGACACAGCATCAAGAAGAACCTGATCGGAGCACTGCTGTTCGACAGCGGAGAAACAGCAGAAGCAACAAGACTGAAGAGA | |
| corresponding | ACAGCAAGAAGAAGATACACAAGAAGAAAGAACAGAATCTGCTACCTGCAGGAAATCTTCAGCAACGAAATGGCAAAGGTCGACGA | |
| to SEQ ID | CAGCTTCTTCCACAGACTGGAAGAAAGCTTCCTGGTCGAAGAAGACAAGAAGCACGAAAGACACCCGATCTTCGGAAACATCGTCG | |
| NO: 4, Kozak | ACGAAGTCGCATACCACGAAAAGTACCCGACAATCTACCACCTGAGAAAGAAGCTGGTCGACAGCACAGACAAGGCAGACCTGAGA | |
| sequence, | CTGATCTACCTGGCACTGGCACACATGATCAAGTTCAGAGGACACTTCCTGATCGAAGGAGACCTGAACCCGGACAACAGCGACGT | |
| and 3′ UTR | CGACAAGCTGTTCATCCAGCTGGTCCAGACATACAACCAGCTGTTCGAAGAAAACCCGATCAACGCAAGCGGAGTCGACGCAAAGG | |
| of ALB | CAATCCTGAGCGCAAGACTGAGCAAGAGCAGAAGACTGGAAAACCTGATCGCACAGCTGCCGGGAGAAAAGAAGAACGGACTGTTC | |
| | GGAAACCTGATCGCACTGAGCCTGGGACTGACACCGAACTTCAAGAGCAACTTCGACCTGGCAGAAGACGCAAAGCTGCAGCTGAG | |
| | CAAGGACACATACGACGACGACCTGGACAACCTGCTGGCACAGATCGGAGACCAGTACGCAGACCTGTTCCTGGCAGCAAAGAACC | |
| | TGAGCGACGCAATCCTGCTGAGCGACATCCTGAGAGTCAACACAGAAATCACAAAGGCACCGCTGAGCGCAAGCATGATCAAGAGA | |
| | TACGACGAACACCACCAGGACCTGACACTGCTGAAGGCACTGGTCAGACAGCAGCTGCCGGAAAAGTACAAGGAAATCTTCTTCGA | |
| | CCAGAGCAAGAACGGATACGCAGGATACATCGACGGAGGAGCAAGCCAGGAAGAATTCTACAAGTTCATCAAGCCGATCCTGGAAA | |
| | AGATGGACGGAAGAGAAGAACTGCTGGTCAAGCTGAACAGAGAAGACCTGCTGAGAAAGCAGAGAACATTCGACAACGGAAGCATC | |
| | CCGCACCAGATCCACCTGGGAGAACTGCACGCAATCCTGAGAAGACAGGAAGACTTCTACCCGTTCCTGAAGGACAACAGAGAAAA | |
| | GATCGAAAAGATCCTGACATTCAGAATCCCGTACTACGTCGGACCGCTGGCAAGAGGAAACAGCAGATTCGCATGGATGACAAGAA | |
| | AGAGCGAAGAAACAATCACACCGTGGAACTTCGAAGAAGTCGTCGACAAGGGAGCAAGCGCACAGAGCTTCATCGAAAGAATGACA | |
| | AACTTCGACAAGAACCTGCCGAACGAAAAGGTCCTGCCGAAGCACAGCCTGCTGTACGAATACTTCACAGTCTACAACGAACTGAC | |
| | AAAGGTCAAGTACGTCACAGAAGGAATGAGAAAGCCGGCATTCCTGAGCGGAGAACAGAAGAAGGCAATCGTCGACCTGCTGTTCA | |
| | AGACAAACAGAAAGGTCACAGTCAAGCAGCTGAAGGAAGACTACTTCAAGAAGATCGAATGCTTCGACAGCGTCGAAATCAGCGGA | |
| | GTCGAAGACAGATTCAACGCAAGCCTGGGAACATACCACGACCTGCTGAAGATCATCAAGGACAAGGACTTCCTGGACAACGAAGA | |
| | AAACGAAGACATCCTGGAAGACATCGTCCTGACACTGACACTGTTCGAAGACAGAGAAATGATCGAAGAAAGACTGAAGACATACG | |
| | CACACCTGTTCGACGACAAGGTCATGAAGCAGCTGAAGAGAAGAAGATACACAGGATGGGGAAGACTGAGCAGAAAGCTGATCAAC | |
| | GGAATCAGAGACAAGCAGAGCGGAAAGACAATCCTGGACTTCCTGAAGAGCGACGGATTCGCAAACAGAAACTTCATGCAGCTGAT | |
| | CCACGACGACAGCCTGACATTCAAGGAAGACATCCAGAAGGCACAGGTCAGCGGACAGGGAGACAGCCTGCACGAACACATCGCAA | |
| | ACCTGGCAGGAAGCCCGGCAATCAAGAAGGGAATCCTGCAGACAGTCAAGGTCGTCGACGAACTGGTCAAGGTCATGGGAAGACAC | |
| | AAGCCGGAAAACATCGTCATCGAAATGGCAAGAGAAAACCAGACAACACAGAAGGGACAGAAGAACAGCAGAGAAAGAATGAAGAG | |
| | AATCGAAGAAGGAATCAAGGAACTGGGAAGCCAGATCCTGAAGGAACACCCGGTCGAAAACACACAGCTGCAGAACGAAAAGCTGT | |
| | ACCTGTACTACCTGCAGAACGGAAGAGACATGTACGTCGACCAGGAACTGGACATCAACAGACTGAGCGACTACGACGTCGACCAC | |
| | ATCGTCCCGCAGAGCTTCCTGAAGGACGACAGCATCGACAACAAGGTCCTGACAAGAAGCGACAAGAACAGAGGAAAGAGCGACAA | |
| | CGTCCCGAGCGAAGAAGTCGTCAAGAAGATGAAGAACTACTGGAGACAGCTGCTGAACGCAAAGCTGATCACACAGAGAAAGTTCG | |
| | ACAACCTGACAAAGGCAGAGAGAGGAGGACTGAGCGAACTGGACAAGGCAGGATTCATCAAGAGACAGCTGGTCGAAACAAGACAG | |
| | ATCACAAAGCACGTCGCACAGATCCTGGACAGCAGAATGAACACAAAGTACGACGAAAACGACAAGCTGATCAGAGAAGTCAAGGT | |
| | CATCACACTGAAGAGCAAGCTGGTCAGCGACTTCAGAAAGGACTTCCAGTTCTACAAGGTCAGAGAAATCAACAACTACCACCACG | |
| | CACACGACGCATACCTGAACGCAGTCGTCGGAACAGCACTGATCAAGAAGTACCCGAAGCTGGAAAGCGAATTCGTCTACGGAGAC | |
| | TACAAGGTCTACGACGTCAGAAAGATGATCGCAAAGAGCGAACAGGAAATCGGAAAGGCAACAGCAAAGTACTTCTTCTACAGCAA | |
| | CATCATGAACTTCTTCAAGACAGAAATCACACTGGCAAACGGAGAAATCAGAAAGAGACCGCTGATCGAAACAAACGGAGAAACAG | |
| | GAGAAATCGTCTGGGACAAGGGAAGAGACTTCGCAACAGTCAGAAAGGTCCTGAGCATGCCGCAGGTCAACATCGTCAAGAAGACA | |
| | GAAGTCCAGACAGGAGGATTCAGCAAGGAAAGCATCCTGCCGAAGAGAAACAGCGACAAGCTGATCGCAAGAAAGAAGGACTGGGA | |
| | CCCGAAGAAGTACGGAGGATTCGACAGCCCGACAGTCGCATACAGCGTCCTGGTCGTCGCAAAGGTCGAAAAGGGAAAGAGCAAGA | |
| | AGCTGAAGAGCGTCAAGGAACTGCTGGGAATCACAATCATGGAAAGAAGCAGCTTCGAAAAGAACCCGATCGACTTCCTGGAAGCA | |
| | AAGGGATACAAGGAAGTCAAGAAGGACCTGATCATCAAGCTGCCGAAGTACAGCCTGTTCGAACTGGAAAACGGAAGAAAGAGAAT | |
| | GCTGGCAAGCGCAGGAGAACTGCAGAAGGGAAACGAACTGGCACTGCCGAGCAAGTACGTCAACTTCCTGTACCTGGCAAGCCACT | |
| | ACGAAAAGCTGAAGGGAAGCCCGGAAGACAACGAACAGAAGCAGCTGTTCGTCGAACAGCACAAGCACTACCTGGACGAAATCATC | |
| | GAACAGATCAGCGAATTCAGCAAGAGAGTCATCCTGGCAGACGCAAACCTGGACAAGGTCCTGAGCGCATACAACAAGCACAGAGA | |
| | CAAGCCGATCAGAGAACAGGCAGAAAACATCATCCACCTGTTCACACTGACAAACCTGGGAGCACCGGCAGCATTCAAGTACTTCG | |
| | ACACAACAATCGACAGAAAGAGATACACAAGCACAAAGGAAGTCCTGGACGCAACACTGATCCACCAGAGCATCACAGGACTGTAC | |
| | GAAACAAGAATCGACCTGAGCCAGCTGGGAGGAGACGGAGGAGGAAGCCCGAAGAAGAAGAGAAAGGTCTAGCTAGCCATCACATT | |
| | TAAAAGCATCTCAGCCTACCATGAGAATAAGAGAAAGAAAATGAAGATCAATAGCTTATTCATCTCTTTTTCTTTTTCGTTGGTGT | |
| | AAAGCCAACACCCTGTCTAAAAAACATAAATTTCTTTAATCATTTTGCCTCTTTTCTCTGTGCTTCAATTAATAAAAAATGGAAAG | |
| | AACCTCGAG | |
| Cas9 | GGGacatttgcttctgacacaactgtgttcactagcaacctcaaacagacaccggatctgccaccATGGACAAGAAGTACAGCATC | 258 |
| transcript | GGACTGGACATCGGAACAAACAGCGTCGGATGGGCAGTCATCACAGACGAATACAAGGTCCCGAGCAAGAAGTTCAAGGTCCTGGG | |
| with 5′ UTR | AAACACAGACAGACACAGCATCAAGAAGAACCTGATCGGAGCACTGCTGTTCGACAGCGGAGAAACAGCAGAAGCAACAAGACTGA | |
| from HBB, ORF | AGAGAACAGCAAGAAGAAGATACACAAGAAGAAAGAACAGAATCTGCTACCTGCAGGAAATCTTCAGCAACGAAATGGCAAAGGTC | |
| corresponding | GACGACAGCTTCTTCCACAGACTGGAAGAAAGCTTCCTGGTCGAAGAAGACAAGAAGCACGAAAGACACCCGATCTTCGGAAACAT | |
| to SEQ ID | CGTCGACGAAGTCGCATACCACGAAAAGTACCCGACAATCTACCACCTGAGAAAGAAGCTGGTCGACAGCACAGACAAGGCAGACC | |
| NO: 4, Kozak | TGAGACTGATCTACCTGGCACTGGCACACATGATCAAGTTCAGAGGACACTTCCTGATCGAAGGAGACCTGAACCCGGACAACAGC | |
| sequence, | GACGTCGACAAGCTGTTCATCCAGCTGGTCCAGACATACAACCAGCTGTTCGAAGAAAACCCGATCAACGCAAGCGGAGTCGACGC | |
| and 3′ UTR | AAAGGCAATCCTGAGCGCAAGACTGAGCAAGAGCAGAAGACTGGAAAACCTGATCGCACAGCTGCCGGGAGAAAAGAAGAACGGAC | |
| of HBB | TGTTCGGAAACCTGATCGCACTGAGCCTGGGACTGACACCGAACTTCAAGAGCAACTTCGACCTGGCAGAAGACGCAAAGCTGCAG | |
| | CTGAGCAAGGACACATACGACGACGACCTGGACAACCTGCTGGCACAGATCGGAGACCAGTACGCAGACCTGTTCCTGGCAGCAAA | |
| | GAACCTGAGCGACGCAATCCTGCTGAGCGACATCCTGAGAGTCAACACAGAAATCACAAAGGCACCGCTGAGCGCAAGCATGATCA | |
| | AGAGATACGACGAACACCACCAGGACCTGACACTGCTGAAGGCACTGGTCAGACAGCAGCTGCCGGAAAAGTACAAGGAAATCTTC | |
| | TTCGACCAGAGCAAGAACGGATACGCAGGATACATCGACGGAGGAGCAAGCCAGGAAGAATTCTACAAGTTCATCAAGCCGATCCT | |
| | GGAAAAGATGGACGGAACAGAAGAACTGCTGGTCAAGCTGAACAGAGAAGACCTGCTGAGAAAGCAGAGAACATTCGACAACGGAA | |
| | GCATCCCGCACCAGATCCACCTGGGAGAACTGCACGCAATCCTGAGAAGACAGGAAGACTTCTACCCGTTCCTGAAGGACAACAGA | |
| | GAAAAGATCGAAAAGATCCTGACATTCAGAATCCCGTACTACGTCGGACCGCTGGCAAGAGGAAACAGCAGATTCGCATGGATGAC | |
| | AAGAAAGAGCGAAGAAACAATCACACCGTGGAACTTCGAAGAAGTCGTCGACAAGGGAGCAAGCGCACAGAGCTTCATCGAAAGAA | |
| | TGACAAACTTCGACAAGAACCTGCCGAACGAAAAGGTCCTGCCGAAGCACAGCCTGCTGTACGAATACTTCACAGTCTACAACGAA | |
| | CTGACAAAGGTCAAGTACGTCACAGAAGGAATGAGAAAGCCGGCATTCCTGAGCGGAGAACAGAAGAAGGCAATCGTCGACCTGCT | |
| | GTTCAAGACAAACAGAAAGGTCACAGTCAAGCAGCTGAAGGAAGACTACTTCAAGAAGATCGAATGCTTCGACAGCGTCGAAATCA | |
| | GCGGAGTCGAAGACAGATTCAACGCAAGCCTGGGAACATACCACGACCTGCTGAAGATCATCAAGGACAAGGACTTCCTGGACAAC | |
| | GAAGAAAACGAAGACATCCTGGAAGACATCGTCCTGACACTGACACTGTTCGAAGACAGAGAAATGATCGAAGAAAGACTGAAGAC | |
| | ATACGCACACCTGTTCGACGACAAGGTCATGAAGCAGCTGAAGAGAAGAAGATACACAGGATGGGGAAGACTGAGCAGAAAGCTGA | |
| | TCAACGGAATCAGAGACAAGCAGAGCGGAAAGACAATCCTGGACTTCCTGAAGAGCGACGGATTCGCAAACAGAAACTTCATGCAG | |
| | CTGATCCACGACGACAGCCTGACATTCAAGGAAGACATCCAGAAGGCACAGGTCAGCGGACAGGGAGACAGCCTGCACGAACACAT | |
| | CGCAAACCTGGCAGGAAGCCCGGCAATCAAGAAGGGAATCCTGCAGACAGTCAAGGTCGTCGACGAACTGGTCAAGGTCATGGGAA | |
| | GACACAAGCCGGAAAACATCGTCATCGAAATGGCAAGAGAAAACCAGACAACACAGAAGGGACAGAAGAACAGCAGAGAAAGAATG | |
| | AAGAGAATCGAAGAAGGAATCAAGGAACTGGGAAGCCAGATCCTGAAGGAACACCCGGTCGAAAACACACAGCTGCAGAACGAAAA | |
| | GCTGTACCTGTACTACCTGCAGAACGGAAGAGACATGTACGTCGACCAGGAACTGGACATCAACAGACTGAGCGACTACGACGTCG | |
| | ACCACATCGTCCCGCAGAGCTTCCTGAAGGACGACAGCATCGACAACAAGGTCCTGACAAGAAGCGACAAGAACAGAGGAAAGAGC | |
| | GACAACGTCCCGAGCGAAGAAGTCGTCAAGAAGATGAAGAACTACTGGAGACAGCTGCTGAACGCAAAGCTGATCACACAGAGAAA | |
| | GTTCGACAACCTGACAAAGGCAGAGAGAGGAGGACTGAGCGAACTGGACAAGGCAGGATTCATCAAGAGACAGCTGGTCGAAACAA | |
| | GACAGATCACAAAGCACGTCGCACAGATCCTGGACAGCAGAATGAACACAAAGTACGACGAAAACGACAAGCTGATCAGAGAAGTC | |
| | AAGGTCATCACACTGAAGAGCAAGCTGGTCAGCGACTTCAGAAAGGACTTCCAGTTCTACAAGGTCAGAGAAATCAACAACTACCA | |
| | CCACGCACACGACGCATACCTGAACGCAGTCGTCGGAACAGCACTGATCAAGAAGTACCCGAAGCTGGAAAGCGAATTCGTCTACG | |
| | GAGACTACAAGGTCTACGACGTCAGAAAGATGATCGCAAAGAGCGAACAGGAAATCGGAAAGGCAACAGCAAAGTACTTCTTCTAC | |
| | AGCAACATCATGAACTTCTTCAAGACAGAAATCACACTGGCAAACGGAGAAATCAGAAAGAGACCGCTGATCGAAACAAACGGAGA | |
| | AACAGGAGAAATCGTCTGGGACAAGGGAAGAGACTTCGCAACAGTCAGAAAGGTCCTGAGCATGCCGCAGGTCAACATCGTCAAGA | |
| | AGACAGAAGTCCAGACAGGAGGATTCAGCAAGGAAAGCATCCTGCCGAAGAGAAACAGCGACAAGCTGATCGCAAGAAAGAAGGAC | |
| | TGGGACCCGAAGAAGTACGGAGGATTCGACAGCCCGACAGTCGCATACAGCGTCCTGGTCGTCGCAAAGGTCGAAAAGGGAAAGAG | |
| | CAAGAAGCTGAAGAGCGTCAAGGAACTGCTGGGAATCACAATCATGGAAAGAAGCAGCTTCGAAAAGAACCCGATCGACTTCCTGG | |
| | AAGCAAAGGGATACAAGGAAGTCAAGAAGGACCTGATCATCAAGCTGCCGAAGTACAGCCTGTTCGAACTGGAAAACGGAAGAAAG | |
| | AGAATGCTGGCAAGCGCAGGAGAACTGCAGAAGGGAAACGAACTGGCACTGCCGAGCAAGTACGTCAACTTCCTGTACCTGGCAAG | |
| | CCACTACGAAAAGCTGAAGGGAAGCCCGGAAGACAACGAACAGAAGCAGCTGTTCGTCGAACAGCACAAGCACTACCTGGACGAAA | |
| | TCATCGAACAGATCAGCGAATTCAGCAAGAGAGTCATCCTGGCAGACGCAAACCTGGACAAGGTCCTGAGCGCATACAACAAGCAC | |
| | AGAGACAAGCCGATCAGAGAACAGGCAGAAAACATCATCCACCTGTTCACACTGACAAACCTGGGAGCACCGGCAGCATTCAAGTA | |
| | CTTCGACACAACAATCGACAGAAAGAGATACACAAGCACAAAGGAAGTCCTGGACGCAACACTGATCCACCAGAGCATCACAGGAC | |
| | TGTACGAAACAAGAATCGACCTGAGCCAGCTGGGAGGAGACGGAGGAGGAAGCCCGAAGAAGAAGAGAAAGGTCTAGctagcgctc | |
| | gctttcttgctgtccaatttctattaaaggttcctttgttccctaagtccaactactaaactgggggatattatgaagggccttga | |
| | gcatctggattctgcctaataaaaaacatttattttcattgcctcgag | |
| Cas9 | GGGaagctcagaataaacgctcaactttggccggatctgccacCATGGACAAGAAGTACAGCATCGGACTGGACATCGGAACAAAC | 259 |
| transcript | AGCGTCGGATGGGCAGTCATCACAGACGAATACAAGGTCCCGAGCAAGAAGTTCAAGGTCCTGGGAAACACAGACAGACACAGCAT | |
| with 5′ UTR | CAAGAAGAACCTGATCGGAGCACTGCTGTTCGACAGCGGAGAAACAGCAGAAGCAACAAGACTGAAGAGAACAGCAAGAAGAAGAT | |
| from XBG, | ACACAAGAAGAAAGAACAGAATCTGCTACCTGCAGGAAATCTTCAGCAACGAAATGGCAAAGGTCGACGACAGCTTCTTCCACAGA | |
| ORF | CTGGAAGAAAGCTTCCTGGTCGAAGAAGACAAGAAGCACGAAAGACACCCGATCTTCGGAAACATCGTCGACGAAGTCGCATACCA | |
| corresponding | CGAAAAGTACCCGACAATCTACCACCTGAGAAAGAAGCTGGTCGACAGCACAGACAAGGCAGACCTGAGACTGATCTACCTGGCAC | |
| to SEQ ID | TGGCACACATGATCAAGTTCAGAGGACACTTCCTGATCGAAGGAGACCTGAACCCGGACAACAGCGACGTCGACAAGCTGTTCATC | |
| NO: 4, Kozak | CAGCTGGTCCAGACATACAACCAGCTGTTCGAAGAAAACCCGATCAACGCAAGCGGAGTCGACGCAAAGGCAATCCTGAGCGCAAG | |
| sequence, | ACTGAGCAAGAGCAGAAGACTGGAAAACCTGATCGCACAGCTGCCGGGAGAAAAGAAGAACGGACTGTTCGGAAACCTGATCGCAC | |
| and 3′ UTR | TGAGCCTGGGACTGACACCGAACTTCAAGAGCAACTTCGACCTGGCAGAAGACGCAAAGCTGCAGCTGAGCAAGGACACATACGAC | |
| of XBG | GACGACCTGGACAACCTGCTGGCACAGATCGGAGACCAGTACGCAGACCTGTTCCTGGCAGCAAAGAACCTGAGCGACGCAATCCT | |
| | GCTGAGCGACATCCTGAGAGTCAACACAGAAATCACAAAGGCACCGCTGAGCGCAAGCATGATCAAGAGATACGACGAACACCACC | |
| | AGGACCTGACACTGCTGAAGGCACTGGTCAGACAGCAGCTGCCGGAAAAGTACAAGGAAATCTTCTTCGACCAGAGCAAGAACGGA | |
| | TACGCAGGATACATCGACGGAGGAGCAAGCCAGGAAGAATTCTACAAGTTCATCAAGCCGATCCTGGAAAAGATGGACGGAACAGA | |
| | AGAACTGCTGGTCAAGCTGAACAGAGAAGACCTGCTGAGAAAGCAGAGAACATTCGACAACGGAAGCATCCCGCACCAGATCCACC | |
| | TGGGAGAACTGCACGCAATCCTGAGAAGACAGGAAGACTTCTACCCGTTCCTGAAGGACAACAGAGAAAAGATCGAAAAGATCCTG | |
| | ACATTCAGAATCCCGTACTACGTCGGACCGCTGGCAAGAGGAAACAGCAGATTCGCATGGATGACAAGAAAGAGCGAAGAAACAAT | |
| | CACACCGTGGAACTTCGAAGAAGTCGTCGACAAGGGAGCAAGCGCACAGAGCTTCATCGAAAGAATGACAAACTTCGACAAGAACC | |
| | TGCCGAACGAAAAGGTCCTGCCGAAGCACAGCCTGCTGTACGAATACTTCACAGTCTACAACGAACTGACAAAGGTCAAGTACGTC | |
| | ACAGAAGGAATGAGAAAGCCGGCATTCCTGAGCGGAGAACAGAAGAAGGCAATCGTCGACCTGCTGTTCAAGACAAACAGAAAGGT | |
| | CACAGTCAAGCAGCTGAAGGAAGACTACTTCAAGAAGATCGAATGCTTCGACAGCGTCGAAATCAGCGGAGTCGAAGACAGATTCA | |
| | ACGCAAGCCTGGGAACATACCACGACCTGCTGAAGATCATCAAGGACAAGGACTTCCTGGACAACGAAGAAAACGAAGACATCCTG | |
| | GAAGACATCGTCCTGACACTGACACTGTTCGAAGACAGAGAAATGATCGAAGAAAGACTGAAGACATACGCACACCTGTTCGACGA | |
| | CAAGGTCATGAAGCAGCTGAAGAGAAGAAGATACACAGGATGGGGAAGACTGAGCAGAAAGCTGATCAACGGAATCAGAGACAAGC | |
| | AGAGCGGAAAGACAATCCTGGACTTCCTGAAGAGCGACGGATTCGCAAACAGAAACTTCATGCAGCTGATCCACGACGACAGCCTG | |
| | ACATTCAAGGAAGACATCCAGAAGGCACAGGTCAGCGGACAGGGAGACAGCCTGCACGAACACATCGCAAACCTGGCAGGAAGCCC | |
| | GGCAATCAAGAAGGGAATCCTGCAGACAGTCAAGGTCGTCGACGAACTGGTCAAGGTCATGGGAAGACACAAGCCGGAAAACATCG | |
| | TCATCGAAATGGCAAGAGAAAACCAGACAACACAGAAGGGACAGAAGAACAGCAGAGAAAGAATGAAGAGAATCGAAGAAGGAATC | |
| | AAGGAACTGGGAAGCCAGATCCTGAAGGAACACCCGGTCGAAAACACACAGCTGCAGAACGAAAAGCTGTACCTGTACTACCTGCA | |
| | GAACGGAAGAGACATGTACGTCGACCAGGAACTGGACATCAACAGACTGAGCGACTACGACGTCGACCACATCGTCCCGCAGAGCT | |
| | TCCTGAAGGACGACAGCATCGACAACAAGGTCCTGACAAGAAGCGACAAGAACAGAGGAAAGAGCGACAACGTCCCGAGCGAAGAA | |
| | GTCGTCAAGAAGATGAAGAACTACTGGAGACAGCTGCTGAACGCAAAGCTGATCACACAGAGAAAGTTCGACAACCTGACAAAGGC | |
| | AGAGAGAGGAGGACTGAGCGAACTGGACAAGGCAGGATTCATCAAGAGACAGCTGGTCGAAACAAGACAGATCACAAAGCACGTCG | |
| | CACAGATCCTGGACAGCAGAATGAACACAAAGTACGACGAAAACGACAAGCTGATCAGAGAAGTCAAGGTCATCACACTGAAGAGC | |
| | AAGCTGGTCAGCGACTTCAGAAAGGACTTCCAGTTCTACAAGGTCAGAGAAATCAACAACTACCACCACGCACACGACGCATACCT | |
| | GAACGCAGTCGTCGGAACAGCACTGATCAAGAAGTACCCGAAGCTGGAAAGCGAATTCGTCTACGGAGACTACAAGGTCTACGACG | |
| | TCAGAAAGATGATCGCAAAGAGCGAACAGGAAATCGGAAAGGCAACAGCAAAGTACTTCTTCTACAGCAACATCATGAACTTCTTC | |
| | AAGACAGAAATCACACTGGCAAACGGAGAAATCAGAAAGAGACCGCTGATCGAAACAAACGGAGAAACAGGAGAAATCGTCTGGGA | |
| | CAAGGGAAGAGACTTCGCAACAGTCAGAAAGGTCCTGAGCATGCCGCAGGTCAACATCGTCAAGAAGACAGAAGTCCAGACAGGAG | |
| | GATTCAGCAAGGAAAGCATCCTGCCGAAGAGAAACAGCGACAAGCTGATCGCAAGAAAGAAGGACTGGGACCCGAAGAAGTACGGA | |
| | GGATTCGACAGCCCGACAGTCGCATACAGCGTCCTGGTCGTCGCAAAGGTCGAAAAGGGAAAGAGCAAGAAGCTGAAGAGCGTCAA | |
| | GGAACTGCTGGGAATCACAATCATGGAAAGAAGCAGCTTCGAAAAGAACCCGATCGACTTCCTGGAAGCAAAGGGATACAAGGAAG | |
| | TCAAGAAGGACCTGATCATCAAGCTGCCGAAGTACAGCCTGTTCGAACTGGAAAACGGAAGAAAGAGAATGCTGGCAAGCGCAGGA | |
| | GAACTGCAGAAGGGAAACGAACTGGCACTGCCGAGCAAGTACGTCAACTTCCTGTACCTGGCAAGCCACTACGAAAAGCTGAAGGG | |
| | AAGCCCGGAAGACAACGAACAGAAGCAGCTGTTCGTCGAACAGCACAAGCACTACCTGGACGAAATCATCGAACAGATCAGCGAAT | |
| | TCAGCAAGAGAGTCATCCTGGCAGACGCAAACCTGGACAAGGTCCTGAGCGCATACAACAAGCACAGAGACAAGCCGATCAGAGAA | |
| | CAGGCAGAAAACATCATCCACCTGTTCACACTGACAAACCTGGGAGCACCGGCAGCATTCAAGTACTTCGACACAACAATCGACAG | |
| | AAAGAGATACACAAGCACAAAGGAAGTCCTGGACGCAACACTGATCCACCAGAGCATCACAGGACTGTACGAAACAAGAATCGACC | |
| | TGAGCCAGCTGGGAGGAGACGGAGGAGGAAGCCCGAAGAAGAAGAGAAAGGTCTAGctagcaccagcctcaagaacacccgaatgg | |
| | agtctctaagctacataataccaacttacactttacaaaatgttgtcccccaaaatgtagccattcgtatctgctcctaataaaaa | |
| | gaaagtttcttcacattctctcgag | |
| Cas9 | AGGaagctcagaataaacgctcaactttggccggatctgccacCATGGACAAGAAGTACAGCATCGGACTGGACATCGGAACAAAC | 260 |
| transcript | AGCGTCGGATGGGCAGTCATCACAGACGAATACAAGGTCCCGAGCAAGAAGTTCAAGGTCCTGGGAAACACAGACAGACACAGCAT | |
| with AGG as | CAAGAAGAACCTGATCGGAGCACTGCTGTTCGACAGCGGAGAAACAGCAGAAGCAACAAGACTGAAGAGAACAGCAAGAAGAAGAT | |
| first three | ACACAAGAAGAAAGAACAGAATCTGCTACCTGCAGGAAATCTTCAGCAACGAAATGGCAAAGGTCGACGACAGCTTCTTCCACAGA | |
| nucleotides | CTGGAAGAAAGCTTCCTGGTCGAAGAAGACAAGAAGCACGAAAGACACCCGATCTTCGGAAACATCGTCGACGAAGTCGCATACCA | |
| for use with | CGAAAAGTACCCGACAATCTACCACCTGAGAAAGAAGCTGGTCGACAGCACAGACAAGGCAGACCTGAGACTGATCTACCTGGCAC | |
| CleanCap ™, | TGGCACACATGATCAAGTTCAGAGGACACTTCCTGATCGAAGGAGACCTGAACCCGGACAACAGCGACGTCGACAAGCTGTTCATC | |
| 5′ UTR from | CAGCTGGTCCAGACATACAACCAGCTGTTCGAAGAAAACCCGATCAACGCAAGCGGAGTCGACGCAAAGGCAATCCTGAGCGCAAG | |
| XBG, ORF | ACTGAGCAAGAGCAGAAGACTGGAAAACCTGATCGCACAGCTGCCGGGAGAAAAGAAGAACGGACTGTTCGGAAACCTGATCGCAC | |
| corresponding | TGAGCCTGGGACTGACACCGAACTTCAAGAGCAACTTCGACCTGGCAGAAGACGCAAAGCTGCAGCTGAGCAAGGACACATACGAC | |
| to SEQ ID | GACGACCTGGACAACCTGCTGGCACAGATCGGAGACCAGTACGCAGACCTGTTCCTGGCAGCAAAGAACCTGAGCGACGCAATCCT | |
| NO: 4, Kozak | GCTGAGCGACATCCTGAGAGTCAACACAGAAATCACAAAGGCACCGCTGAGCGCAAGCATGATCAAGAGATACGACGAACACCACC | |
| sequence, | AGGACCTGACACTGCTGAAGGCACTGGTCAGACAGCAGCTGCCGGAAAAGTACAAGGAAATCTTCTTCGACCAGAGCAAGAACGGA | |
| and 3′ UTR | TACGCAGGATACATCGACGGAGGAGCAAGCCAGGAAGAATTCTACAAGTTCATCAAGCCGATCCTGGAAAAGATGGACGGAACAGA | |
| of XBG | AGAACTGCTGGTCAAGCTGAACAGAGAAGACCTGCTGAGAAAGCAGAGAACATTCGACAACGGAAGCATCCCGCACCAGATCCACC | |
| | TGGGAGAACTGCACGCAATCCTGAGAAGACAGGAAGACTTCTACCCGTTCCTGAAGGACAACAGAGAAAAGATCGAAAAGATCCTG | |
| | ACATTCAGAATCCCGTACTACGTCGGACCGCTGGCAAGAGGAAACAGAAGATTCGCATGGATGACAAGAAAGAGCGAAGAAACAAT | |
| | CACACCGTGGAACTTCGAAGAAGTCGTCGACAAGGGAGCAAGCGCACAGAGCTTCATCGAAAGAATGACAAACTTCGACAAGAACC | |
| | TGCCGAACGAAAAGGTCCTGCCGAAGCACAGCCTGCTGTACGAATACTTCACAGTCTACAACGAACTGACAAAGGTCAAGTACGTC | |
| | ACAGAAGGAATGAGAAAGCCGGCATTCCTGAGCGGAGAACAGAAGAAGGCAATCGTCGACCTGCTGTTCAAGACAAACAGAAAGGT | |
| | CACAGTCAAGCAGCTGAAGGAAGACTACTTCAAGAAGATCGAATGCTTCGACAGCGTCGAAATCAGCGGAGTCGAAGACAGATTCA | |
| | ACGCAAGCCTGGGAACATACCACGACCTGCTGAAGATCATCAAGGACAAGGACTTCCTGGACAACGAAGAAAACGAAGACATCCTG | |
| | GAAGACATCGTCCTGACACTGACACTGTTCGAAGACAGAGAAATGATCGAAGAAAGACTGAAGACATACGCACACCTGTTCGACGA | |
| | CAAGGTCATGAAGCAGCTGAAGAGAAGAAGATACACAGGATGGGGAAGACTGAGCAGAAAGCTGATCAACGGAATCAGAGACAAGC | |
| | AGAGCGGAAAGACAATCCTGGACTTCCTGAAGAGCGACGGATTCGCAAACAGAAACTTCATGCAGCTGATCCACGACGACAGCCTG | |
| | ACATTCAAGGAAGACATCCAGAAGGCACAGGTCAGCGGACAGGGAGACAGCCTGCACGAACACATCGCAAACCTGGCAGGAAGCCC | |
| | GGCAATCAAGAAGGGAATCCTGCAGACAGTCAAGGTCGTCGACGAACTGGTCAAGGTCATGGGAAGACACAAGCCGGAAAACATCG | |
| | TCATCGAAATGGCAAGAGAAAACCAGACAACACAGAAGGGACAGAAGAACAGCAGAGAAAGAATGAAGAGAATCGAAGAAGGAATC | |
| | AAGGAACTGGGAAGCCAGATCCTGAAGGAACACCCGGTCGAAAACACACAGCTGCAGAACGAAAAGCTGTACCTGTACTACCTGCA | |
| | GAACGGAAGAGACATGTACGTCGACCAGGAACTGGACATCAACAGACTGAGCGACTACGACGTCGACCACATCGTCCCGCAGAGCT | |
| | TCCTGAAGGACGACAGCATCGACAACAAGGTCCTGACAAGAAGCGACAAGAACAGAGGAAAGAGCGACAACGTCCCGAGCGAAGAA | |
| | GTCGTCAAGAAGATGAAGAACTACTGGAGACAGCTGCTGAACGCAAAGCTGATCACACAGAGAAAGTTCGACAACCTGACAAAGGC | |
| | AGAGAGAGGAGGACTGAGCGAACTGGACAAGGCAGGATTCATCAAGAGACAGCTGGTCGAAACAAGACAGATCACAAAGCACGTCG | |
| | CACAGATCCTGGACAGCAGAATGAACACAAAGTACGACGAAAACGACAAGCTGATCAGAGAAGTCAAGGTCATCACACTGAAGAGC | |
| | AAGCTGGTCAGCGACTTCAGAAAGGACTTCCAGTTCTACAAGGTCAGAGAAATCAACAACTACCACCACGCACACGACGCATACCT | |
| | GAACGCAGTCGTCGGAACAGCACTGATCAAGAAGTACCCGAAGCTGGAAAGCGAATTCGTCTACGGAGACTACAAGGTCTACGACG | |
| | TCAGAAAGATGATCGCAAAGAGCGAACAGGAAATCGGAAAGGCAACAGCAAAGTACTTCTTCTACAGCAACATCATGAACTTCTTC | |
| | AAGACAGAAATCACACTGGCAAACGGAGAAATCAGAAAGAGACCGCTGATCGAAACAAACGGAGAAACAGGAGAAATCGTCTGGGA | |
| | CAAGGGAAGAGACTTCGCAACAGTCAGAAAGGTCCTGAGCATGCCGCAGGTCAACATCGTCAAGAAGACAGAAGTCCAGACAGGAG | |
| | GATTCAGCAAGGAAAGCATCCTGCCGAAGAGAAACAGCGACAAGCTGATCGCAAGAAAGAAGGACTGGGACCCGAAGAAGTACGGA | |
| | GGATTCGACAGCCCGACAGTCGCATACAGCGTCCTGGTCGTCGCAAAGGTCGAAAAGGGAAAGAGCAAGAAGCTGAAGAGCGTCAA | |
| | GGAACTGCTGGGAATCACAATCATGGAAAGAAGCAGCTTCGAAAAGAACCCGATCGACTTCCTGGAAGCAAAGGGATACAAGGAAG | |
| | TCAAGAAGGACCTGATCATCAAGCTGCCGAAGTACAGCCTGTTCGAACTGGAAAACGGAAGAAAGAGAATGCTGGCAAGCGCAGGA | |
| | GAACTGCAGAAGGGAAACGAACTGGCACTGCCGAGCAAGTACGTCAACTTCCTGTACCTGGCAAGCCACTACGAAAAGCTGAAGGG | |
| | AAGCCCGGAAGACAACGAACAGAAGCAGCTGTTCGTCGAACAGCACAAGCACTACCTGGACGAAATCATCGAACAGATCAGCGAAT | |
| | TCAGCAAGAGAGTCATCCTGGCAGACGCAAACCTGGACAAGGTCCTGAGCGCATACAACAAGCACAGAGACAAGCCGATCAGAGAA | |
| | CAGGCAGAAAACATCATCCACCTGTTCACACTGACAAACCTGGGAGCACCGGCAGCATTCAAGTACTTCGACACAACAATCGACAG | |
| | AAAGAGATACACAAGCACAAAGGAAGTCCTGGACGCAACACTGATCCACCAGAGCATCACAGGACTGTACGAAACAAGAATCGACC | |
| | TGAGCCAGCTGGGAGGAGACGGAGGAGGAAGCCCGAAGAAGAAGAGAAAGGTCTAGctagcaccagcctcaagaacacccgaatgg | |
| | agtctctaagctacataataccaacttacactttacaaaatgttgtcccccaaaatgtagccattcgtatctgctcctaataaaaa | |
| | gaaagtttcttcacattctctcgag | |
| Cas9 | AGGTCCCGCAGTCGGCGTCCAGCGGCTCTGCTTGTTCGTGTGTGTGTCGTTGCAGGCCTTATTCGGATCCGCCACCATGGACAAGA | 261 |
| transcript | AGTACAGCATCGGACTGGACATCGGAACAAACAGCGTCGGATGGGCAGTCATCACAGACGAATACAAGGTCCCGAGCAAGAAGTTC | |
| with AGG as | AAGGTCCTGGGAAACACAGACAGACACAGCATCAAGAAGAACCTGATCGGAGCACTGCTGTTCGACAGCGGAGAAACAGCAGAAGC | |
| first three | AACAAGACTGAAGAGAACAGCAAGAAGAAGATACACAAGAAGAAAGAACAGAATCTGCTACCTGCAGGAAATCTTCAGCAACGAAA | |
| nucleotides | TGGCAAAGGTCGACGACAGCTTCTTCCACAGACTGGAAGAAAGCTTCCTGGTCGAAGAAGACAAGAAGCACGAAAGACACCCGATC | |
| for use with | TTCGGAAACATCGTCGACGAAGTCGCATACCACGAAAAGTACCCGACAATCTACCACCTGAGAAAGAAGCTGGTCGACAGCACAGA | |
| CleanCap ™, | CAAGGCAGACCTGAGACTGATCTACCTGGCACTGGCACACATGATCAAGTTCAGAGGACACTTCCTGATCGAAGGAGACCTGAACC | |
| 5′ UTR from | CGGACAACAGCGACGTCGACAAGCTGTTCATCCAGCTGGTCCAGACATACAACCAGCTGTTCGAAGAAAACCCGATCAACGCAAGC | |
| HSD, ORF | GGAGTCGACGCAAAGGCAATCCTGAGCGCAAGACTGAGCAAGAGCAGAAGACTGGAAAACCTGATCGCACAGCTGCCGGGAGAAAA | |
| corresponding | GAAGAACGGACTGTTCGGAAACCTGATCGCACTGAGCCTGGGACTGACACCGAACTTCAAGAGCAACTTCGACCTGGCAGAAGACG | |
| to SEQ ID | CAAAGCTGCAGCTGAGCAAGGACACATACGACGACGACCTGGACAACCTGCTGGCACAGATCGGAGACCAGTACGCAGACCTGTTC | |
| NO: 4, Kozak | CTGGCAGCAAAGAACCTGAGCGACGCAATCCTGCTGAGCGACATCCTGAGAGTCAACACAGAAATCACAAAGGCACCGCTGAGCGC | |
| sequence, | AAGCATGATCAAGAGATACGACGAACACCACCAGGACCTGACACTGCTGAAGGCACTGGTCAGACAGCAGCTGCCGGAAAAGTACA | |
| and 3′ UTR | AGGAAATCTTCTTCGACCAGAGCAAGAACGGATACGCAGGATACATCGACGGAGGAGCAAGCCAGGAAGAATTCTACAAGTTCATC | |
| of ALB | AAGCCGATCCTGGAAAAGATGGACGGAACAGAAGAACTGCTGGTCAAGCTGAACAGAGAAGACCTGCTGAGAAAGCAGAGAACATT | |
| | CGACAACGGAAGCATCCCGCACCAGATCCACCTGGGAGAACTGCACGCAATCCTGAGAAGACAGGAAGACTTCTACCCGTTCCTGA | |
| | AGGACAACAGAGAAAAGATCGAAAAGATCCTGACATTCAGAATCCCGTACTACGTCGGACCGCTGGCAAGAGGAAACAGCAGATTC | |
| | GCATGGATGACAAGAAAGAGCGAAGAAACAATCACACCGTGGAACTTCGAAGAAGTCGTCGACAAGGGAGCAAGCGCACAGAGCTT | |
| | CATCGAAAGAATGACAAACTTCGACAAGAACCTGCCGAACGAAAAGGTCCTGCCGAAGCACAGCCTGCTGTACGAATACTTCACAG | |
| | TCTACAACGAACTGACAAAGGTCAAGTACGTCACAGAAGGAATGAGAAAGCCGGCATTCCTGAGCGGAGAACAGAAGAAGGCAATC | |
| | GTCGACCTGCTGTTCAAGACAAACAGAAAGGTCACAGTCAAGCAGCTGAAGGAAGACTACTTCAAGAAGATCGAATGCTTCGACAG | |
| | CGTCGAAATCAGCGGAGTCGAAGACAGATTCAACGCAAGCCTGGGAACATACCACGACCTGCTGAAGATCATCAAGGACAAGGACT | |
| | TCCTGGACAACGAAGAAAACGAAGACATCCTGGAAGACATCGTCCTGACACTGACACTGTTCGAAGACAGAGAAATGATCGAAGAA | |
| | AGACTGAAGACATACGCACACCTGTTCGACGACAAGGTCATGAAGCAGCTGAAGAGAAGAAGATACACAGGATGGGGAAGACTGAG | |
| | CAGAAAGCTGATCAACGGAATCAGAGACAAGCAGAGCGGAAAGACAATCCTGGACTTCCTGAAGAGCGACGGATTCGCAAACAGAA | |
| | ACTTCATGCAGCTGATCCACGACGACAGCCTGACATTCAAGGAAGACATCCAGAAGGCACAGGTCAGCGGACAGGGAGACAGCCTG | |
| | CACGAACACATCGCAAACCTGGCAGGAAGCCCGGCAATCAAGAAGGGAATCCTGCAGACAGTCAAGGTCGTCGACGAACTGGTCAA | |
| | GGTCATGGGAAGACACAAGCCGGAAAACATCGTCATCGAAATGGCAAGAGAAAACCAGACAACACAGAAGGGACAGAAGAACAGCA | |
| | GAGAAAGAATGAAGAGAATCGAAGAAGGAATCAAGGAACTGGGAAGCCAGATCCTGAAGGAACACCCGGTCGAAAACACACAGCTG | |
| | CAGAACGAAAAGCTGTACCTGTACTACCTGCAGAACGGAAGAGACATGTACGTCGACCAGGAACTGGACATCAACAGACTGAGCGA | |
| | CTACGACGTCGACCACATCGTCCCGCAGAGCTTCCTGAAGGACGACAGCATCGACAACAAGGTCCTGACAAGAAGCGACAAGAACA | |
| | GAGGAAAGAGCGACAACGTCCCGAGCGAAGAAGTCGTCAAGAAGATGAAGAACTACTGGAGACAGCTGCTGAACGCAAAGCTGATC | |
| | ACACAGAGAAAGTTCGACAACCTGACAAAGGCAGAGAGAGGAGGACTGAGCGAACTGGACAAGGCAGGATTCATCAAGAGACAGCT | |
| | GGTCGAAACAAGACAGATCACAAAGCACGTCGCACAGATCCTGGACAGCAGAATGAACACAAAGTACGACGAAAACGACAAGCTGA | |
| | TCAGAGAAGTCAAGGTCATCACACTGAAGAGCAAGCTGGTCAGCGACTTCAGAAAGGACTTCCAGTTCTACAAGGTCAGAGAAATC | |
| | AACAACTACCACCACGCACACGACGCATACCTGAACGCAGTCGTCGGAACAGCACTGATCAAGAAGTACCCGAAGCTGGAAAGCGA | |
| | ATTCGTCTACGGAGACTACAAGGTCTACGACGTCAGAAAGATGATCGCAAAGAGCGAACAGGAAATCGGAAAGGCAACAGCAAAGT | |
| | ACTTCTTCTACAGCAACATCATGAACTTCTTCAAGACAGAAATCACACTGGCAAACGGAGAAATCAGAAAGAGACCGCTGATCGAA | |
| | ACAAACGGAGAAACAGGAGAAATCGTCTGGGACAAGGGAAGAGACTTCGCAACAGTCAGAAAGGTCCTGAGCATGCCGCAGGTCAA | |
| | CATCGTCAAGAAGACAGAAGTCCAGACAGGAGGATTCAGCAAGGAAAGCATCCTGCCGAAGAGAAACAGCGACAAGCTGATCGCAA | |
| | GAAAGAAGGACTGGGACCCGAAGAAGTACGGAGGATTCGACAGCCCGACAGTCGCATACAGCGTCCTGGTCGTCGCAAAGGTCGAA | |
| | AAGGGAAAGAGCAAGAAGCTGAAGAGCGTCAAGGAACTGCTGGGAATCACAATCATGGAAAGAAGCAGCTTCGAAAAGAACCCGAT | |
| | CGACTTCCTGGAAGCAAAGGGATACAAGGAAGTCAAGAAGGACCTGATCATCAAGCTGCCGAAGTACAGCCTGTTCGAACTGGAAA | |
| | ACGGAAGAAAGAGAATGCTGGCAAGCGCAGGAGAACTGCAGAAGGGAAACGAACTGGCACTGCCGAGCAAGTACGTCAACTTCCTG | |
| | TACCTGGCAAGCCACTACGAAAAGCTGAAGGGAAGCCCGGAAGACAACGAACAGAAGCAGCTGTTCGTCGAACAGCACAAGCACTA | |
| | CCTGGACGAAATCATCGAACAGATCAGCGAATTCAGCAAGAGAGTCATCCTGGCAGACGCAAACCTGGACAAGGTCCTGAGCGCAT | |
| | ACAACAAGCACAGAGACAAGCCGATCAGAGAACAGGCAGAAAACATCATCCACCTGTTCACACTGACAAACCTGGGAGCACCGGCA | |
| | GCATTCAAGTACTTCGACACAACAATCGACAGAAAGAGATACACAAGCACAAAGGAAGTCCTGGACGCAACACTGATCCACCAGAG | |
| | CATCACAGGACTGTACGAAACAAGAATCGACCTGAGCCAGCTGGGAGGAGACGGAGGAGGAAGCCCGAAGAAGAAGAGAAAGGTCT | |
| | AGCTAGCCATCACATTTAAAAGCATCTCAGCCTACCATGAGAATAAGAGAAAGAAAATGAAGATCAATAGCTTATTCATCTCTTTT | |
| | TCTTTTTCGTTGGTGTAAAGCCAACACCCTGTCTAAAAAACATAAATTTCTTTAATCATTTTGCCTCTTTTCTCTGTGCTTCAATT | |
| | AATAAAAAATGGAAAGAACCTCGAG | |
| 30/30/39 | AAAAAAAAAAAAAAAAAAAAAAAAAAAAAAGCGAAAAAAAAAAAAAAAAAAAAAAAAAAAAAACCGAAAAAAAAAAAAAAAAAAAA | 262 |
| poly-A | AAAAAAAAAAAAAAAAAAA | |
| sequence | | |
| poly-A 100 | AAAAAAAAAAAAAAAAAAAAAAAAAAAAAAAAAAAAAAAAAAAAAAAAAAAAAAAAAAAAAAAAAAAAAAAAAAAAAAAAAAAAAA | 263 |
| sequence | AAAAAAA | |
| | Not Used | 264 |
| ORF encoding | ATGGCAGCATTCAAGCCGAACTCGATCAACTACATCCTGGGACTGGACATCGGAATCGCATCGGTCGGATGGGCAATGGTCGAAAT | 265 |
| Neisseria | CGACGAAGAAGAAAACCCGATCAGACTGATCGACCTGGGAGTCAGAGTCTTCGAAAGAGCAGAAGTCCCGAAGACAGGAGACTCGC | |
| meningitidis | TGGCAATGGCAAGAAGACTGGCAAGATCGGTCAGAAGACTGACAAGAAGAAGAGCACACAGACTGCTGAGAACAAGAAGACTGCTG | |
| Cas9 | AAGAGAGAAGGAGTCCTGCAGGCAGCAAACTTCGACGAAAACGGACTGATCAAGTCGCTGCCGAACACACCGTGGCAGCTGAGAGC | |
| | AGCAGCACTGGACAGAAAGCTGACACCGCTGGAATGGTCGGCAGTCCTGCTGCACCTGATCAAGCACAGAGGATACCTGTCGCAGA | |
| | GAAAGAACGAAGGAGAAACAGCAGACAAGGAACTGGGAGCACTGCTGAAGGGAGTCGCAGGAAACGCACACGCACTGCAGACAGGA | |
| | GACTTCAGAACACCGGCAGAACTGGCACTGAACAAGTTCGAAAAGGAATCGGGACACATCAGAAACCAGAGATCGGACTACTCGCA | |
| | CACATTCTCGAGAAAGGACCTGCAGGCAGAACTGATCCTGCTGTTCGAAAAGCAGAAGGAATTCGGAAACCCGCACGTCTCGGGAG | |
| | GACTGAAGGAAGGAATCGAAACACTGCTGATGACACAGAGACCGGCACTGTCGGGAGACGCAGTCCAGAAGATGCTGGGACACTGC | |
| | ACATTCGAACCGGCAGAACCGAAGGCAGCAAAGAACACATACACAGCAGAAAGATTCATCTGGCTGACAAAGCTGAACAACCTGAG | |
| | AATCCTGGAACAGGGATCGGAAAGACCGCTGACAGACACAGAAAGAGCAACACTGATGGACGAACCGTACAGAAAGTCGAAGCTGA | |
| | CATACGCACAGGCAAGAAAGCTGCTGGGACTGGAAGACACAGCATTCTTCAAGGGACTGAGATACGGAAAGGACAACGCAGAAGCA | |
| | TCGACACTGATGGAAATGAAGGCATACCACGCAATCTCGAGAGCACTGGAAAAGGAAGGACTGAAGGACAAGAAGTCGCCGCTGAA | |
| | CCTGTCGCCGGAACTGCAGGACGAAATCGGAACAGCATTCTCGCTGTTCAAGACAGACGAAGACATCACAGGAAGACTGAAGGACA | |
| | GAATCCAGCCGGAAATCCTGGAAGCACTGCTGAAGCACATCTCGTTCGACAAGTTCGTCCAGATCTCGCTGAAGGCACTGAGAAGA | |
| | ATCGTCCCGCTGATGGAACAGGGAAAGAGATACGACGAAGCATGCGCAGAAATCTACGGAGACCACTACGGAAAGAAGAACACAGA | |
| | AGAAAAGATCTACCTGCCGCCGATCCCGGCAGACGAAATCAGAAACCCGGTCGTCCTGAGAGCACTGTCGCAGGCAAGAAAGGTCA | |
| | TCAACGGAGTCGTCAGAAGATACGGATCGCCGGCAAGAATCCACATCGAAACAGCAAGAGAAGTCGGAAAGTCGTTCAAGGACAGA | |
| | AAGGAAATCGAAAAGAGACAGGAAGAAAACAGAAAGGACAGAGAAAAGGCAGCAGCAAAGTTCAGAGAATACTTCCCGAACTTCGT | |
| | CGGAGAACCGAAGTCGAAGGACATCCTGAAGCTGAGACTGTACGAACAGCAGCACGGAAAGTGCCTGTACTCGGGAAAGGAAATCA | |
| | ACCTGGGAAGACTGAACGAAAAGGGATACGTCGAAATCGACCACGCACTGCCGTTCTCGAGAACATGGGACGACTCGTTCAACAAC | |
| | AAGGTCCTGGTCCTGGGATCGGAAAACCAGAACAAGGGAAACCAGACACCGTACGAATACTTCAACGGAAAGGACAACTCGAGAGA | |
| | ATGGCAGGAATTCAAGGCAAGAGTCGAAACATCGAGATTCCCGAGATCGAAGAAGCAGAGAATCCTGCTGCAGAAGTTCGACGAAG | |
| | ACGGATTCAAGGAAAGAAACCTGAACGACACAAGATACGTCAACAGATTCCTGTGCCAGTTCGTCGCAGACAGAATGAGACTGACA | |
| | GGAAAGGGAAAGAAGAGAGTCTTCGCATCGAACGGACAGATCACAAACCTGCTGAGAGGATTCTGGGGACTGAGAAAGGTCAGAGC | |
| | AGAAAACGACAGACACCACGCACTGGACGCAGTCGTCGTCGCATGCTCGACAGTCGCAATGCAGCAGAAGATCACAAGATTCGTCA | |
| | GATACAAGGAAATGAACGCATTCGACGGAAAGACAATCGACAAGGAAACAGGAGAAGTCCTGCACCAGAAGACACACTTCCCGCAG | |
| | CCGTGGGAATTCTTCGCACAGGAAGTCATGATCAGAGTCTTCGGAAAGCCGGACGGAAAGCCGGAATTCGAAGAAGCAGACACACT | |
| | GGAAAAGCTGAGAACACTGCTGGCAGAAAAGCTGTCGTCGAGACCGGAAGCAGTCCACGAATACGTCACACCGCTGTTCGTCTCGA | |
| | GAGCACCGAACAGAAAGATGTCGGGACAGGGACACATGGAAACAGTCAAGTCGGCAAAGAGACTGGACGAAGGAGTCTCGGTCCTG | |
| | AGAGTCCCGCTGACACAGCTGAAGCTGAAGGACCTGGAAAAGATGGTCAACAGAGAAAGAGAACCGAAGCTGTACGAAGCACTGAA | |
| | GGCAAGACTGGAAGCACACAAGGACGACCCGGCAAAGGCATTCGCAGAACCGTTCTACAAGTACGACAAGGCAGGAAACAGAACAC | |
| | AGCAGGTCAAGGCAGTCAGAGTCGAACAGGTCCAGAAGACAGGAGTCTGGGTCAGAAACCACAACGGAATCGCAGACAACGCAACA | |
| | ATGGTCAGAGTAGACGTCTTCGAAAAGGGAGACAAGTACTACCTGGTCCCGATCTACTCGTGGCAGGTCGCAAAGGGAATCCTGCC | |
| | GGACAGAGCAGTCGTCCAGGGAAAGGACGAAGAAGACTGGCAGCTGATCGACGACTCGTTCAACTTCAAGTTCTCGCTGCACCCGA | |
| | ACGACCTGGTCGAAGTCATCACAAAGAAGGCAAGAATGTTCGGATACTTCGCATCGTGCCACAGAGGAACAGGAAACATCAACATC | |
| | AGAATCCACGACCTGGACCACAAGATCGGAAAGAACGGAATCCTGGAAGGAATCGGAGTCAAGACAGCACTGTCGTTCCAGAAGTA | |
| | CCAGATCGACGAACTGGGAAAGGAAATCAGACCGTGCAGACTGAAGAAGAGACCGCCGGTCAGATCCGGAAAGAGAACAGCAGACG | |
| | GATCGGAATTCGAATCGCCGAAGAAGAAGAGAAAGGTCGAATGA | |
| ORF encoding | GCAGCATTCAAGCCGAACTCGATCAACTACATCCTGGGACTGGACATCGGAATCGCATCGGTCGGATGGGCAATGGTCGAAATCGA | 266 |
| Neisseria | CGAAGAAGAAAACCCGATCAGACTGATCGACCTGGGAGTCAGAGTCTTCGAAAGAGCAGAAGTCCCGAAGACAGGAGACTCGCTGG | |
| meningitidis | CAATGGCAAGAAGACTGGCAAGATCGGTCAGAAGACTGACAAGAAGAAGAGCACACAGACTGCTGAGAACAAGAAGACTGCTGAAG | |
| Cas9 (no | AGAGAAGGAGTCCTGCAGGCAGCAAACTTCGACGAAAACGGACTGATCAAGTCGCTGCCGAACACACCGTGGCAGCTGAGAGCAGC | |
| start or | AGCACTGGACAGAAAGCTGACACCGCTGGAATGGTCGGCAGTCCTGCTGCACCTGATCAAGCACAGAGGATACCTGTCGCAGAGAA | |
| stop codons; | AGAACGAAGGAGAAACAGCAGACAAGGAACTGGGAGCACTGCTGAAGGGAGTCGCAGGAAACGCACACGCACTGCAGACAGGAGAC | |
| suitable for | TTCAGAACACCGGCAGAACTGGCACTGAACAAGTTCGAAAAGGAATCGGGACACATCAGAAACCAGAGATCGGACTACTCGCACAC | |
| inclusion in | ATTCTCGAGAAAGGACCTGCAGGCAGAACTGATCCTGCTGTTCGAAAAGCAGAAGGAATTCGGAAACCCGCACGTCTCGGGAGGAC | |
| fusion | TGAAGGAAGGAATCGAAACACTGCTGATGACACAGAGACCGGCACTGTCGGGAGACGCAGTCCAGAAGATGCTGGGACACTGCACA | |
| protein | TTCGAACCGGCAGAACCGAAGGCAGCAAAGAACACATACACAGCAGAAAGATTCATCTGGCTGACAAAGCTGAACAACCTGAGAAT | |
| coding | CCTGGAACAGGGATCGGAAAGACCGCTGACAGACACAGAAAGAGCAACACTGATGGACGAACCGTACAGAAAGTCGAAGCTGACAT | |
| sequence) | ACGCACAGGCAAGAAAGCTGCTGGGACTGGAAGACACAGCATTCTTCAAGGGACTGAGATACGGAAAGGACAACGCAGAAGCATCG | |
| | ACACTGATGGAAATGAAGGCATACCACGCAATCTCGAGAGCACTGGAAAAGGAAGGACTGAAGGACAAGAAGTCGCCGCTGAACCT | |
| | GTCGCCGGAACTGCAGGACGAAATCGGAACAGCATTCTCGCTGTTCAAGACAGACGAAGACATCACAGGAAGACTGAAGGACAGAA | |
| | TCCAGCCGGAAATCCTGGAAGCACTGCTGAAGCACATCTCGTTCGACAAGTTCGTCCAGATCTCGCTGAAGGCACTGAGAAGAATC | |
| | GTCCCGCTGATGGAACAGGGAAAGAGATACGACGAAGCATGCGCAGAAATCTACGGAGACCACTACGGAAAGAAGAACACAGAAGA | |
| | AAAGATCTACCTGCCGCCGATCCCGGCAGACGAAATCAGAAACCCGGTCGTCCTGAGAGCACTGTCGCAGGCAAGAAAGGTCATCA | |
| | ACGGAGTCGTCAGAAGATACGGATCGCCGGCAAGAATCCACATCGAAACAGCAAGAGAAGTCGGAAAGTCGTTCAAGGACAGAAAG | |
| | GAAATCGAAAAGAGACAGGAAGAAAACAGAAAGGACAGAGAAAAGGCAGCAGCAAAGTTCAGAGAATACTTCCCGAACTTCGTCGG | |
| | AGAACCGAAGTCGAAGGACATCCTGAAGCTGAGACTGTACGAACAGCAGCACGGAAAGTGCCTGTACTCGGGAAAGGAAATCAACC | |
| | TGGGAAGACTGAACGAAAAGGGATACGTCGAAATCGACCACGCACTGCCGTTCTCGAGAACATGGGACGACTCGTTCAACAACAAG | |
| | GTCCTGGTCCTGGGATCGGAAAACCAGAACAAGGGAAACCAGACACCGTACGAATACTTCAACGGAAAGGACAACTCGAGAGAATG | |
| | GCAGGAATTCAAGGCAAGAGTCGAAACATCGAGATTCCCGAGATCGAAGAAGCAGAGAATCCTGCTGCAGAAGTTCGACGAAGACG | |
| | GATTCAAGGAAAGAAACCTGAACGACACAAGATACGTCAACAGATTCCTGTGCCAGTTCGTCGCAGACAGAATGAGACTGACAGGA | |
| | AAGGGAAAGAAGAGAGTCTTCGCATCGAACGGACAGATCACAAACCTGCTGAGAGGATTCTGGGGACTGAGAAAGGTCAGAGCAGA | |
| | AAACGACAGACACCACGCACTGGACGCAGTCGTCGTCGCATGCTCGACAGTCGCAATGCAGCAGAAGATCACAAGATTCGTCAGAT | |
| | ACAAGGAAATGAACGCATTCGACGGAAAGACAATCGACAAGGAAACAGGAGAAGTCCTGCACCAGAAGACACACTTCCCGCAGCCG | |
| | TGGGAATTCTTCGCACAGGAAGTCATGATCAGAGTCTTCGGAAAGCCGGACGGAAAGCCGGAATTCGAAGAAGCAGACACACTGGA | |
| | AAAGCTGAGAACACTGCTGGCAGAAAAGCTGTCGTCGAGACCGGAAGCAGTCCACGAATACGTCACACCGCTGTTCGTCTCGAGAG | |
| | CACCGAACAGAAAGATGTCGGGACAGGGACACATGGAAACAGTCAAGTCGGCAAAGAGACTGGACGAAGGAGTCTCGGTCCTGAGA | |
| | GTCCCGCTGACACAGCTGAAGCTGAAGGACCTGGAAAAGATGGTCAACAGAGAAAGAGAACCGAAGCTGTACGAAGCACTGAAGGC | |
| | AAGACTGGAAGCACACAAGGACGACCCGGCAAAGGCATTCGCAGAACCGTTCTACAAGTACGACAAGGCAGGAAACAGAACACAGC | |
| | AGGTCAAGGCAGTCAGAGTCGAACAGGTCCAGAAGACAGGAGTCTGGGTCAGAAACCACAACGGAATCGCAGACAACGCAACAATG | |
| | GTCAGAGTAGACGTCTTCGAAAAGGGAGACAAGTACTACCTGGTCCCGATCTACTCGTGGCAGGTCGCAAAGGGAATCCTGCCGGA | |
| | CAGAGCAGTCGTCCAGGGAAAGGACGAAGAAGACTGGCAGCTGATCGACGACTCGTTCAACTTCAAGTTCTCGCTGCACCCGAACG | |
| | ACCTGGTCGAAGTCATCACAAAGAAGGCAAGAATGTTCGGATACTTCGCATCGTGCCACAGAGGAACAGGAAACATCAACATCAGA | |
| | ATCCACGACCTGGACCACAAGATCGGAAAGAACGGAATCCTGGAAGGAATCGGAGTCAAGACAGCACTGTCGTTCCAGAAGTACCA | |
| | GATCGACGAACTGGGAAAGGAAATCAGACCGTGCAGACTGAAGAAGAGACCGCCGGTCAGATCCGGAAAGAGAACAGCAGACGGAT | |
| | CGGAATTCGAATCGCCGAAGAAGAAGAGAAAGGTCGAA | |
| Transcript | GGGAGACCCAAGCTGGCTAGCGTTTAAACTTAAGCTTGGATCCGCCACCATGGCAGCATTCAAGCCGAACTCGATCAACTACATCC | 267 |
| comprising | TGGGACTGGACATCGGAATCGCATCGGTCGGATGGGCAATGGTCGAAATCGACGAAGAAGAAAACCCGATCAGACTGATCGACCTG | |
| SEQ ID NO: | GGAGTCAGAGTCTTCGAAAGAGCAGAAGTCCCGAAGACAGGAGACTCGCTGGCAATGGCAAGAAGACTGGCAAGATCGGTCAGAAG | |
| 65 (encoding | ACTGACAAGAAGAAGAGCACACAGACTGCTGAGAACAAGAAGACTGCTGAAGAGAGAAGGAGTCCTGCAGGCAGCAAACTTCGACG | |
| Neisseria | AAAACGGACTGATCAAGTCGCTGCCGAACACACCGTGGCAGCTGAGAGCAGCAGCACTGGACAGAAAGCTGACACCGCTGGAATGG | |
| meningitidis | TCGGCAGTCCTGCTGCACCTGATCAAGCACAGAGGATACCTGTCGCAGAGAAAGAACGAAGGAGAAACAGCAGACAAGGAACTGGG | |
| Cas9) | AGCACTGCTGAAGGGAGTCGCAGGAAACGCACACGCACTGCAGACAGGAGACTTCAGAACACCGGCAGAACTGGCACTGAACAAGT | |
| | TCGAAAAGGAATCGGGACACATCAGAAACCAGAGATCGGACTACTCGCACACATTCTCGAGAAAGGACCTGCAGGCAGAACTGATC | |
| | CTGCTGTTCGAAAAGCAGAAGGAATTCGGAAACCCGCACGTCTCGGGAGGACTGAAGGAAGGAATCGAAACACTGCTGATGACACA | |
| | GAGACCGGCACTGTCGGGAGACGCAGTCCAGAAGATGCTGGGACACTGCACATTCGAACCGGCAGAACCGAAGGCAGCAAAGAACA | |
| | CATACACAGCAGAAAGATTCATCTGGCTGACAAAGCTGAACAACCTGAGAATCCTGGAACAGGGATCGGAAAGACCGCTGACAGAC | |
| | ACAGAAAGAGCAACACTGATGGACGAACCGTACAGAAAGTCGAAGCTGACATACGCACAGGCAAGAAAGCTGCTGGGACTGGAAGA | |
| | CACAGCATTCTTCAAGGGACTGAGATACGGAAAGGACAACGCAGAAGCATCGACACTGATGGAAATGAAGGCATACCACGCAATCT | |
| | CGAGAGCACTGGAAAAGGAAGGACTGAAGGACAAGAAGTCGCCGCTGAACCTGTCGCCGGAACTGCAGGACGAAATCGGAACAGCA | |
| | TTCTCGCTGTTCAAGACAGACGAAGACATCACAGGAAGACTGAAGGACAGAATCCAGCCGGAAATCCTGGAAGCACTGCTGAAGCA | |
| | CATCTCGTTCGACAAGTTCGTCCAGATCTCGCTGAAGGCACTGAGAAGAATCGTCCCGCTGATGGAACAGGGAAAGAGATACGACG | |
| | AAGCATGCGCAGAAATCTACGGAGACCACTACGGAAAGAAGAACACAGAAGAAAAGATCTACCTGCCGCCGATCCCGGCAGACGAA | |
| | ATCAGAAACCCGGTCGTCCTGAGAGCACTGTCGCAGGCAAGAAAGGTCATCAACGGAGTCGTCAGAAGATACGGATCGCCGGCAAG | |
| | AATCCACATCGAAACAGCAAGAGAAGTCGGAAAGTCGTTCAAGGACAGAAAGGAAATCGAAAAGAGACAGGAAGAAAACAGAAAGG | |
| | ACAGAGAAAAGGCAGCAGCAAAGTTCAGAGAATACTTCCCGAACTTCGTCGGAGAACCGAAGTCGAAGGACATCCTGAAGCTGAGA | |
| | CTGTACGAACAGCAGCACGGAAAGTGCCTGTACTCGGGAAAGGAAATCAACCTGGGAAGACTGAACGAAAAGGGATACGTCGAAAT | |
| | CGACCACGCACTGCCGTTCTCGAGAACATGGGACGACTCGTTCAACAACAAGGTCCTGGTCCTGGGATCGGAAAACCAGAACAAGG | |
| | GAAACCAGACACCGTACGAATACTTCAACGGAAAGGACAACTCGAGAGAATGGCAGGAATTCAAGGCAAGAGTCGAAACATCGAGA | |
| | TTCCCGAGATCGAAGAAGCAGAGAATCCTGCTGCAGAAGTTCGACGAAGACGGATTCAAGGAAAGAAACCTGAACGACACAAGATA | |
| | CGTCAACAGATTCCTGTGCCAGTTCGTCGCAGACAGAATGAGACTGACAGGAAAGGGAAAGAAGAGAGTCTTCGCATCGAACGGAC | |
| | AGATCACAAACCTGCTGAGAGGATTCTGGGGACTGAGAAAGGTCAGAGCAGAAAACGACAGACACCACGCACTGGACGCAGTCGTC | |
| | GTCGCATGCTCGACAGTCGCAATGCAGCAGAAGATCACAAGATTCGTCAGATACAAGGAAATGAACGCATTCGACGGAAAGACAAT | |
| | CGACAAGGAAACAGGAGAAGTCCTGCACCAGAAGACACACTTCCCGCAGCCGTGGGAATTCTTCGCACAGGAAGTCATGATCAGAG | |
| | TCTTCGGAAAGCCGGACGGAAAGCCGGAATTCGAAGAAGCAGACACACTGGAAAAGCTGAGAACACTGCTGGCAGAAAAGCTGTCG | |
| | TCGAGACCGGAAGCAGTCCACGAATACGTCACACCGCTGTTCGTCTCGAGAGCACCGAACAGAAAGATGTCGGGACAGGGACACAT | |
| | GGAAACAGTCAAGTCGGCAAAGAGACTGGACGAAGGAGTCTCGGTCCTGAGAGTCCCGCTGACACAGCTGAAGCTGAAGGACCTGG | |
| | AAAAGATGGTCAACAGAGAAAGAGAACCGAAGCTGTACGAAGCACTGAAGGCAAGACTGGAAGCACACAAGGACGACCCGGCAAAG | |
| | GCATTCGCAGAACCGTTCTACAAGTACGACAAGGCAGGAAACAGAACACAGCAGGTCAAGGCAGTCAGAGTCGAACAGGTCCAGAA | |
| | GACAGGAGTCTGGGTCAGAAACCACAACGGAATCGCAGACAACGCAACAATGGTCAGAGTAGACGTCTTCGAAAAGGGAGACAAGT | |
| | ACTACCTGGTCCCGATCTACTCGTGGCAGGTCGCAAAGGGAATCCTGCCGGACAGAGCAGTCGTCCAGGGAAAGGACGAAGAAGAC | |
| | TGGCAGCTGATCGACGACTCGTTCAACTTCAAGTTCTCGCTGCACCCGAACGACCTGGTCGAAGTCATCACAAAGAAGGCAAGAAT | |
| | GTTCGGATACTTCGCATCGTGCCACAGAGGAAaAGGAAACATCAACATCAGAATCCACGACCTGGACCACAAGATCGGAAAGAACG | |
| | GAATCCTGGAAGGAATCGGAGTCAAGACAGCACTGTCGTTCCAGAAGTACCAGATCGACGAACTGGGAAAGGAAATCAGACCGTGC | |
| | AGACTGAAGAAGAGACCGCCGGTCAGATCCGGAAAGAGAACAGCAGACGGATCGGAATTCGAATCGCCGAAGAAGAAGAGAAAGGT | |
| | CGAATGATAGCTAGCTCGAGTCTAGAGGGCCCGTTTAAACCCGCTGATCAGCCTCGACTGTGCCTTCTAGTTGCCAGCCATCTGTT | |
| | GTTTGCCCCTCCCCCGTGCCTTCCTTGACCCTGGAAGGTGCCACTCCCACTGTCCTTTCCTAATAAAATGAGGAAATTGCATCGCA | |
| | TTGTCTGAGTAGGTGTCATTCTATTCTGGGGGGTGGGGTGGGGCAGGACAGCAAGGGGGAGGATTGGGAAGACAATAGCAGGCATG | |
| | CTGGGGATGCGGTGGGCTCTATGG | |
| Amino acid | MAAFKPNSINYILGLDIGIASVGWAMVEIDEEENPIRLIDLGVRVFERAEVPKTGDSLAMARRLARSVRRLTRRRAHRLLRTRRLL | 268 |
| sequence of | KREGVLQAANFDENGLIKSLPNTPWQLRAAALDRKLTPLEWSAVLLHLIKHRGYLSQRKNEGETADKELGALLKGVAGNAHALQTG | |
| Neisseria | DFRTPAELALNKFEKESGHIRNQRSDYSHTFSRKDLQAELILLFEKQKEFGNPHVSGGLKEGIETLLMTQRPALSGDAVQKMLGHC | |
| meningitidis | TFEPAEPKAAKNTYTAERFIWLTKLNNLRILEQGSERPLTDTERATLMDEPYRKSKLTYAQARKLLGLEDTAFFKGLRYGKDNAEA | |
| Cas9 | STLMEMKAYHAISRALEKEGLKDKKSPLNLSPELQDEIGTAFSLFKTDEDITGRLKDRIQPEILEALLKHISFDKFVQISLKALRR | |
| | IVPLMEQGKRYDEACAEIYGDHYGKKNTEEKIYLPPIPADEIRNPVVLRALSQARKVINGVVRRYGSPARIHIETAREVGKSFKDR | |
| | KEIEKRQEENRKDREKAAAKFREYFPNFVGEPKSKDILKLRLYEQQHGKCLYSGKEINLGRLNEKGYVEIDHALPFSRTWDDSFNN | |
| | KVLVLGSENQNKGNQTPYEYFNGKDNSREWQEFKARVETSRFPRSKKQRILLQKFDEDGFKERNLNDTRYVNRFLCQFVADRMRLT | |
| | GKGKKRVFASNGQITNLLRGFWGLRKVRAENDRHHALDAVVVACSTVAMQQKITRFVRYKEMNAFDGKTIDKETGEVLHQKTHFPQ | |
| | PWEFFAQEVMIRVFGKPDGKPEFEEADTLEKLRTLLAEKLSSRPEAVHEYVTPLFVSRAPNRKMSGQGHMETVKSAKRLDEGVSVL | |
| | RVPLTQLKLKDLEKMVNREREPKLYEALKARLEAHKDDPAKAFAEPFYKYDKAGNRTQQVKAVRVEQVQKTGVWVRNHNGIADNAT | |
| | MVRVDVFEKGDKYYLVPIYSWQVAKGILPDRAVVQGKDEEDWQLIDDSFNFKFSLHPNDLVEVITKKARMFGYFASCHRGTGNINI | |
| | RIHDLDHKIGKNGILEGIGVKTALSFQKYQIDELGKEIRPCRLKKRPPVRSGKRTADGSEFESPKKKRKVE | |
| | Not Used | 269 |
| G502 guide | mA*mC*mA*CAAAUACCAGUCCAGCGGUUUUAGAmGmCmUmAmGmAmAmAmUmAmGmCAAGUUAAAAUAAGGCUAGUCCGUUAUCA | 270 |
| RNA | mAmCmUmUmGGmUmGmGmCmAmCmCmGmAmGmUmCmGmGmUmGmCmU*mU*mU*mU | |
| G509 guide | mA*mA*mA*GUUCUAGAUGCCGUCCGGUUUUAGAmGmCmUmAmGmAmAmAmUmAmGmCAAGUUAAAAUAAGGCUAGUCCGUUAUCA | 271 |
| RNA | mAmCmUmUmGGmUmGmGmCmAmCmCmGmAmGmUmCmGmGmUmGmCmU*mU*mU*mU | |
| G534 guide | mA*mC*mG*CAAAUAUCAGUCCAGCGGUUUUAGAmGmCmUmAmGmAmAmAmUmAmGmCAAGUUAAAAUAAGGCUAGUCCGUUAUCA | 272 |
| RNA | mAmCmUmUmGGmUmGmGmCmAmCmCmGmAmGmUmCmGmGmUmGmCmU*mU*mU*mU | |
| DNA coding | TCGCGCGTTTCGGTGATGACGGTGAAAACCTCTGACACATGCAGCTCCCGGAGACGGTCACAGCTTGTCTGTAAGCGGATGCCGGG | 273 |
| sequence of | AGCAGACAAGCCCGTCAGGGCGCGTCAGCGGGTGTTGGCGGGTGTCGGGGCTGGCTTAACTATGCGGCATCAGAGCAGATTGTACT | |
| eGFP | GAGAGTGCACCATATGCGGTGTGAAATACCGCACAGATGCGTAAGGAGAAAATACCGCATCAGGCGCCATTCGCCATTCAGGCTGC | |
| | GCAACTGTTGGGAAGGGCGATCGGTGCGGGCCTCTTCGCTATTACGCCAGCTGGCGAAAGGGGGATGTGCTGCAAGGCGATTAAGT | |
| | TGGGTAACGCCAGGGTTTTCCCAGTCACGACGTTGTAAAACGACGGCCAGTGAATTCTAATACGACTCACTATAGGGTCCCGCAGT | |
| | CGGCGTCCAGCGGCTCTGCTTGTTCGTGTGTGTGTCGTTGCAGGCCTTATTCGGATCCATGGTGAGCAAGGGCGAGGAGCTGTTCA | |
| | CCGGGGTGGTGCCCATCCTGGTCGAGCTGGACGGCGACGTAAACGGCCACAAGTTCAGCGTGTCCGGCGAGGGCGAGGGCGATGCC | |
| | ACCTACGGCAAGCTGACCCTGAAGTTCATCTGCACCACCGGCAAGCTGCCCGTGCCCTGGCCCACCCTCGTGACCACCCTGACCTA | |
| | CGGCGTGCAGTGCTTCAGCCGCTACCCCGACCACATGAAGCAGCACGACTTCTTCAAGTCCGCCATGCCCGAAGGCTACGTCCAGG | |
| | AGCGCACCATCTTCTTCAAGGACGACGGCAACTACAAGACCCGCGCCGAGGTGAAGTTCGAGGGCGACACCCTGGTGAACCGCATC | |
| | GAGCTGAAGGGCATCGACTTCAAGGAGGACGGCAACATCCTGGGGCACAAGCTGGAGTACAACTACAACAGCCACAACGTCTATAT | |
| | CATGGCCGACAAGCAGAAGAACGGCATCAAGGTGAACTTCAAGATCCGCCACAACATCGAGGACGGCAGCGTGCAGCTCGCCGACC | |
| | ACTACCAGCAGAACACCCCCATCGGCGACGGCCCCGTGCTGCTGCCCGACAACCACTACCTGAGCACCCAGTCCGCCCTGAGCAAA | |
| | GACCCCAACGAGAAGCGCGATCACATGGTCCTGCTGGAGTTCGTGACCGCCGCCGGGATCACTCTCGGCATGGACGAGCTGTACAA | |
| | GTAATAGGAATTATGCAGTCTAGCCATCACATTTAAAAGCATCTCAGCCTACCATGAGAATAAGAGAAAGAAAATGAAGATCAATA | |
| | GCTTATTCATCTCTTTTTCTTTTTCGTTGGTGTAAAGCCAACACCCTGTCTAAAAAACATAAATTTCTTTAATCATTTTGCCTCTT | |
| | TTCTCTGTGCTTCAATTAATAAAAAATGGAAAGAACCTCGAGAAAAAAAAAAAAAAAAAAAAAAAAAAAAAAAAAAAAAAAAAAAA | |
| | AAAAAAAAAAAAAAAAAAAAAAAAAAAAAAAAAAAAAAAAAAAAAAAAAAAAAAAATCTAGACTTAAGCTTGATGAGCTCTAGCTT | |
| | GGCGTAATCATGGTCATAGCTGTTTCCTGTGTGAAATTGTTATCCGCTCACAATTCCACACAACATACGAGCCGGAAGCATAAAGT | |
| | GTAAAGCCTGGGGTGCCTAATGAGTGAGCTAACTCACATTAATTGCGTTGCGCTCACTGCCCGCTTTCCAGTCGGGAAACCTGTCG | |
| | TGCCAGCTGCATTAATGAATCGGCCAACGCGCGGGGAGAGGCGGTTTGCGTATTGGGCGCTCTTCCGCTTCCTCGCTCACTGACTC | |
| | GCTGCGCTCGGTCGTTCGGCTGCGGCGAGCGGTATCAGCTCACTCAAAGGCGGTAATACGGTTATCCACAGAATCAGGGGATAACG | |
| | CAGGAAAGAACATGTGAGCAAAAGGCCAGCAAAAGGCCAGGAACCGTAAAAAGGCCGCGTTGCTGGCGTTTTTCCATAGGCTCCGC | |
| | CCCCCTGACGAGCATCACAAAAATCGACGCTCAAGTCAGAGGTGGCGAAACCCGACAGGACTATAAAGATACCAGGCGTTTCCCCC | |
| | TGGAAGCTCCCTCGTGCGCTCTCCTGTTCCGACCCTGCCGCTTACCGGATACCTGTCCGCCTTTCTCCCTTCGGGAAGCGTGGCGC | |
| | TTTCTCATAGCTCACGCTGTAGGTATCTCAGTTCGGTGTAGGTCGTTCGCTCCAAGCTGGGCTGTGTGCACGAACCCCCCGTTCAG | |
| | CCCGACCGCTGCGCCTTATCCGGTAACTATCGTCTTGAGTCCAACCCGGTAAGACACGACTTATCGCCACTGGCAGCAGCCACTGG | |
| | TAACAGGATTAGCAGAGCGAGGTATGTAGGCGGTGCTACAGAGTTCTTGAAGTGGTGGCCTAACTACGGCTACACTAGAAGAACAG | |
| | TATTTGGTATCTGCGCTCTGCTGAAGCCAGTTACCTTCGGAAAAAGAGTTGGTAGCTCTTGATCCGGCAAACAAACCACCGCTGGT | |
| | AGCGGTGGTTTTTTTGTTTGCAAGCAGCAGATTACGCGCAGAAAAAAAGGATCTCAAGAAGATCCTTTGATCTTTTCTACGGGGTC | |
| | TGACGCTCAGTGGAACGAAAACTCACGTTAAGGGATTTTGGTCATGAGATTATCAAAAAGGATCTTCACCTAGATCCTTTTAAATT | |
| | AAAAATGAAGTTTTAAATCAATCTAAAGTATATATGAGTAAACTTGGTCTGACAGTTACCAATGCTTAATCAGTGAGGCACCTATC | |
| | TCAGCGATCTGTCTATTTCGTTCATCCATAGTTGCCTGACTCCCCGTCGTGTAGATAACTACGATACGGGAGGGCTTACCATCTGG | |
| | CCCCAGTGCTGCAATGATACCGCGAGACCCACGCTCACCGGCTCCAGATTTATCAGCAATAAACCAGCCAGCCGGAAGGGCCGAGC | |
| | GCAGAAGTGGTCCTGCAACTTTATCCGCCTCCATCCAGTCTATTAATTGTTGCCGGGAAGCTAGAGTAAGTAGTTCGCCAGTTAAT | |
| | AGTTTGCGCAACGTTGTTGCCATTGCTACAGGCATCGTGGTGTCACGCTCGTCGTTTGGTATGGCTTCATTCAGCTCCGGTTCCCA | |
| | ACGATCAAGGCGAGTTACATGATCCCCCATGTTGTGCAAAAAAGCGGTTAGCTCCTTCGGTCCTCCGATCGTTGTCAGAAGTAAGT | |
| | TGGCCGCAGTGTTATCACTCATGGTTATGGCAGCACTGCATAATTCTCTTACTGTCATGCCATCCGTAAGATGCTTTTCTGTGACT | |
| | GGTGAGTACTCAACCAAGTCATTCTGAGAATAGTGTATGCGGCGACCGAGTTGCTCTTGCCCGGCGTCAATACGGGATAATACCGC | |
| | GCCACATAGCAGAACTTTAAAAGTGCTCATCATTGGAAAACGTTCTTCGGGGCGAAAACTCTCAAGGATCTTACCGCTGTTGAGAT | |
| | CCAGTTCGATGTAACCCACTCGTGCACCCAACTGATCTTCAGCATCTTTTACTTTCACCAGCGTTTCTGGGTGAGCAAAAACAGGA | |
| | AGGCAAAATGCCGCAAAAAAGGGAATAAGGGCGACACGGAAATGTTGAATACTCATACTCTTCCTTTTTCAATATTATTGAAGCAT | |
| | TTATCAGGGTTATTGTCTCATGAGCGGATACATATTTGAATGTATTTAGAAAAATAAACAAATAGGGGTTCCGCGCACATTTCCCC | |
| | GAAAAGTGCCACCTGACGTCTAAGAAACCATTATTATCATGACATTAACCTATAAAAATAGGCGTATCACGAGGCCCTTTCGTCG | |
| | Not Used | 274 |
| CMV-1 5′ UTR | CAGATCGCCTGGAGACGCCATCCACGCTGTTTTGACCTCCAT | 275 |
| CNV-2 5′ UTR | AGAAGACACCGGGACCGATCCAGCCTCCGCGGCCGGGAACGG | 276 |
| CNV-3 5′ UTR | TGCATTGGAACGCGGATTCCCCGTGCCAAGAGTGACTCACCG | 277 |
| SV40 NLS | PKKKRKV | 278 |
| Exemplary | LAAKRSRTT | 279 |
| NLS 1 | | |
| Exemplary | QAAKRSRTT | 280 |
| NLS 2 | | |
| Exemplary | PAPAKRERTT | 281 |
| NLS 3 | | |
| Exemplary | QAAKRPRTT | 282 |
| NLS 4 | | |
| Exemplary | RAAKRPRTT | 283 |
| NLS 5 | | |
| Exemplary | AAAKRSWSMAA | 284 |
| NLS 6 | | |
| Exemplary | AAAKRVWSMAF | 285 |
| NLS 7 | | |
| Exemplary | AAAKRSWSMAF | 286 |
| NLS 8 | | |
| Exemplary | AAAKRKYFAA | 287 |
| NLS9 | | |
| Exemplary | RAAKRKAFAA | 288 |
| NLS 10 | | |
| Exemplary | RAAKRKYFAV | 289 |
| NLS 11 | | |
| Alternate | PKKKRRV | 290 |
| SV40 NLS | | |
| Nucleoplasmin | KRPAATKKAGQAKKKK | 291 |
| NLS | | |
| Exemplary | CCGAAGAAGAAGAGAAAGGTC | 292 |
| coding | | |
| sequence for | | |
| SV40 NLS | | |
| Exemplary | CTGGCAGCAAAGAGAAGCAGAACAACA | 293 |
| coding | | |
| sequence for | | |
| NLS1 | | |
| Exemplary | CAGGCAGCAAAGAGAAGCAGAACAACA | 294 |
| coding | | |
| sequence for | | |
| NLS2 | | |
| Exemplary | CCGGCACCGGCAAAGAGAGAAAGAACAACA | 295 |
| coding | | |
| sequence for | | |
| NLS3 | | |
| Exemplary | CAGGCAGCAAAGAGACCGAGAACAACA | 296 |
| coding | | |
| sequence for | | |
| NLS4 | | |
| Exemplary | AGAGCAGCAAAGAGACCGAGAACAACA | 297 |
| coding | | |
| sequence for | | |
| NLS5 | | |
| Exemplary | GCAGCAGCAAAGAGAAGCTGGAGCATGGCAGCA | 298 |
| coding | | |
| sequence for | | |
| NLS6 | | |
| Exemplary | GCAGCAGCAAAGAGAGTCTGGAGCATGGCATTC | 299 |
| coding | | |
| sequence for | | |
| NLS7 | | |
| Exemplary | GCAGCAGCAAAGAGAAGCTGGAGCATGGCATTC | 300 |
| coding | | |
| sequence for | | |
| NLS8 | | |
| Exemplary | GCAGCAGCAAAGAGAAAGTACTTCGCAGCA | 301 |
| coding | | |
| sequence for | | |
| NLS9 | | |
| Exemplary | AGAGCAGCAAAGAGAAAGGCATTCGCAGCA | 302 |
| coding | | |
| sequence for | | |
| NLS10 | | |
| Exemplary | AGAGCAGCAAAGAGAAAGTACTTCGCAGTC | 303 |
| coding | | |
| sequence for | | |
| NLS11 | | |
| Exemplary | CCGAAGAAGAAGAGAAGAGTC | 304 |
| coding | | |
| sequence for | | |
| alternate | | |
| SV40 NLS | | |
| exemplary | gccgccRccAUGG | 305 |
| Kozak | | |
| sequence | | |
| | Not Used | 306 |
| Cas9 ORF | ATGGACAAGAAGTACTCTATCGGTTTGGACATCGGTACCAACTCTGTCGGTTGGGCCGTCATCACCGACGAATACAAGGTCCCATC | 307 |
| using long | TAAGAAGTTCAAGGTCTTGGGTAACACCGACAGACACTCTATCAAGAAGAACTTGATCGGTGCCTTGTTGTTCGACTCTGGTGAAA | |
| half life | CCGCCGAAGCCACCAGATTGAAGAGAACCGCCAGAAGAAGATACACCAGAAGAAAGAACAGAATCTGCTACTTGCAAGAAATCTTC | |
| codons of | TCTAACGAAATGGCCAAGGTCGACGACTCTTTCTTCCACAGATTGGAAGAATCTTTCTTGGTCGAAGAAGACAAGAAGCACGAAAG | |
| Table 4, | ACACCCAATCTTCGGTAACATCGTCGACGAAGTCGCCTACCACGAAAAGTACCCAACCATCTACCACTTGAGAAAGAAGTTGGTCG | |
| with start | ACTCTACCGACAAGGCCGACTTGAGATTGATCTACTTGGCCTTGGCCCACATGATCAAGTTCAGAGGTCACTTCTTGATCGAAGGT | |
| and stop | GACTTGAACCCAGACAACTCTGACGTCGACAAGTTGTTCATCCAATTGGTCCAAACCTACAACCAATTGTTCGAAGAAAACCCAAT | |
| codons | CAACGCCTCTGGTGTCGACGCCAAGGCCATCTTGTCTGCCAGATTGTCTAAGAGCAGAAGATTGGAAAACTTGATCGCCCAATTGC | |
| | CAGGTGAAAAGAAGAACGGTTTGTTCGGTAACTTGATCGCCTTGTCTTTGGGTTTGACCCCAAACTTCAAGTCTAACTTCGACTTG | |
| | GCCGAAGACGCCAAGTTGCAATTGTCTAAGGACACCTACGACGACGACTTGGACAACTTGTTGGCCCAAATCGGTGACCAATACGC | |
| | CGACTTGTTCTTGGCCGCCAAGAACTTGTCTGACGCCATCTTGTTGTCTGACATCTTGAGAGTCAACACCGAAATCACCAAGGCCC | |
| | CATTGTCTGCCTCTATGATCAAGAGATACGACGAACACCACCAAGACTTGACCTTGTTGAAGGCCTTGGTCAGACAACAATTGCCA | |
| | GAAAAGTACAAGGAAATCTTCTTCGACCAATCTAAGAACGGTTACGCCGGTTACATCGACGGTGGTGCCTCTCAAGAAGAATTCTA | |
| | CAAGTTCATCAAGCCAATCTTGGAAAAGATGGACGGTACCGAAGAATTGTTGGTCAAGTTGAACAGAGAAGACTTGTTGAGAAAGC | |
| | AAAGAACCTTCGACAACGGTTCTATCCCACACCAAATCCACTTGGGTGAATTGCACGCCATCTTGAGAAGACAAGAAGACTTCTAC | |
| | CCATTCTTGAAGGACAACAGAGAAAAGATCGAAAAGATCTTGACCTTCAGAATCCCATACTACGTCGGTCCATTGGCCAGAGGTAA | |
| | CAGCAGATTCGCCTGGATGACCAGAAAGTCTGAAGAAACCATCACCCCATGGAACTTCGAAGAAGTCGTCGACAAGGGTGCCTCTG | |
| | CCCAATCTTTCATCGAAAGAATGACCAACTTCGACAAGAACTTGCCAAACGAAAAGGTCTTGCCAAAGCACTCTTTGTTGTACGAA | |
| | TACTTCACCGTCTACAACGAATTGACCAAGGTCAAGTACGTCACCGAAGGTATGAGAAAGCCAGCCTTCTTGTCTGGTGAACAAAA | |
| | GAAGGCCATCGTCGACTTGTTGTTCAAGACCAACAGAAAGGTCACCGTCAAGCAATTGAAGGAAGACTACTTCAAGAAGATCGAAT | |
| | GCTTCGACTCTGTCGAAATCTCTGGTGTCGAAGACAGATTCAACGCCTCTTTGGGTACCTACCACGACTTGTTGAAGATCATCAAG | |
| | GACAAGGACTTCTTGGACAACGAAGAAAACGAAGACATCTTGGAAGACATCGTCTTGACCTTGACCTTGTTCGAAGACAGAGAAAT | |
| | GATCGAAGAAAGATTGAAGACCTACGCCCACTTGTTCGACGACAAGGTCATGAAGCAATTGAAGAGAAGAAGATACACCGGTTGGG | |
| | GTAGATTGAGCAGAAAGTTGATCAACGGTATCAGAGACAAGCAATCTGGTAAGACCATCTTGGACTTCTTGAAGTCTGACGGTTTC | |
| | GCCAACAGAAACTTCATGCAATTGATCCACGACGACTCTTTGACCTTCAAGGAAGACATCCAAAAGGCCCAAGTCTCTGGTCAAGG | |
| | TGACTCTTTGCACGAACACATCGCCAACTTGGCCGGTTCTCCAGCCATCAAGAAGGGTATCTTGCAAACCGTCAAGGTCGTCGACG | |
| | AATTGGTCAAGGTCATGGGTAGACACAAGCCAGAAAACATCGTCATCGAAATGGCCAGAGAAAACCAAACCACCCAAAAGGGTCAA | |
| | AAGAACAGCAGAGAAAGAATGAAGAGAATCGAAGAAGGTATCAAGGAATTGGGTTCTCAAATCTTGAAGGAACACCCAGTCGAAAA | |
| | CACCCAATTGCAAAACGAAAAGTTGTACTTGTACTACTTGCAAAACGGTAGAGACATGTACGTCGACCAAGAATTGGACATCAACA | |
| | GATTGTCTGACTACGACGTCGACCACATCGTCCCACAATCTTTCTTGAAGGACGACTCTATCGACAACAAGGTCTTGACCAGATCT | |
| | GACAAGAACAGAGGTAAGTCTGACAACGTCCCATCTGAAGAAGTCGTCAAGAAGATGAAGAACTACTGGAGACAATTGTTGAACGC | |
| | CAAGTTGATCACCCAAAGAAAGTTCGACAACTTGACCAAGGCCGAAAGAGGTGGTTTGTCTGAATTGGACAAGGCCGGTTTCATCA | |
| | AGAGACAATTGGTCGAAACCAGACAAATCACCAAGCACGTCGCCCAAATCTTGGACAGCAGAATGAACACCAAGTACGACGAAAAC | |
| | GACAAGTTGATCAGAGAAGTCAAGGTCATCACCTTGAAGTCTAAGTTGGTCTCTGACTTCAGAAAGGACTTCCAATTCTACAAGGT | |
| | CAGAGAAATCAACAACTACCACCACGCCCACGACGCCTACTTGAACGCCGTCGTCGGTACCGCCTTGATCAAGAAGTACCCAAAGT | |
| | TGGAATCTGAATTCGTCTACGGTGACTACAAGGTCTACGACGTCAGAAAGATGATCGCCAAGTCTGAACAAGAAATCGGTAAGGCC | |
| | ACCGCCAAGTACTTCTTCTACTCTAACATCATGAACTTCTTCAAGACCGAAATCACCTTGGCCAACGGTGAAATCAGAAAGAGACC | |
| | ATTGATCGAAACCAACGGTGAAACCGGTGAAATCGTCTGGGACAAGGGTAGAGACTTCGCCACCGTCAGAAAGGTCTTGTCTATGC | |
| | CACAAGTCAACATCGTCAAGAAGACCGAAGTCCAAACCGGTGGTTTCTCTAAGGAATCTATCTTGCCAAAGAGAAACTCTGACAAG | |
| | TTGATCGCCAGAAAGAAGGACTGGGACCCAAAGAAGTACGGTGGTTTCGACTCTCCAACCGTCGCCTACTCTGTCTTGGTCGTCGC | |
| | CAAGGTCGAAAAGGGTAAGTCTAAGAAGTTGAAGTCTGTCAAGGAATTGTTGGGTATCACCATCATGGAAAGATCTTCTTTCGAAA | |
| | AGAACCCAATCGACTTCTTGGAAGCCAAGGGTTACAAGGAAGTCAAGAAGGACTTGATCATCAAGTTGCCAAAGTACTCTTTGTTC | |
| | GAATTGGAAAACGGTAGAAAGAGAATGTTGGCCTCTGCCGGTGAATTGCAAAAGGGTAACGAATTGGCCTTGCCATCTAAGTACGT | |
| | CAACTTCTTGTACTTGGCCTCTCACTACGAAAAGTTGAAGGGTTCTCCAGAAGACAACGAACAAAAGCAATTGTTCGTCGAACAAC | |
| | ACAAGCACTACTTGGACGAAATCATCGAACAAATCTCTGAATTCTCTAAGAGAGTCATCTTGGCCGACGCCAACTTGGACAAGGTC | |
| | TTGTCTGCCTACAACAAGCACAGAGACAAGCCAATCAGAGAACAAGCCGAAAACATCATCCACTTGTTCACCTTGACCAACTTGGG | |
| | TGCCCCAGCCGCCTTCAAGTACTTCGACACCACCATCGACAGAAAGAGATACACCTCTACCAAGGAAGTCTTGGACGCCACCTTGA | |
| | TCCACCAATCTATCACCGGTTTGTACGAAACCAGAATCGACTTGTCTCAATTGGGTGGTGACGGTGGTGGTTCTCCAAAGAAGAAG | |
| | AGAAAGGTCTAA | |
| Cas9 ORF | ATGGATAAAAAATATTCTATTGGTTTAGATATTGGTACTAATTCTGTTGGTTGGGCTGTTATTACTGATGAATATAAAGTTCCTTC | 308 |
| using U rich | TAAAAAATTTAAAGTTTTAGGTAATACTGATCGTCATTCTATTAAAAAAAATTTAATTGGTGCTTTATTATTTGATTCTGGTGAAA | |
| codons of | CTGCTGAAGCTACTCGTTTAAAACGTACTGCTCGTCGTCGTTATACTCGTCGTAAAAATCGTATTTGTTATTTACAAGAAATTTTT | |
| Table 4, | TCTAATGAAATGGCTAAAGTTGATGATTCTTTTTTTCATCGTTTAGAAGAATCTTTTTTAGTTGAAGAAGATAAAAAACATGAACG | |
| with start | TCATCCTATTTTTGGTAATATTGTTGATGAAGTTGCTTATCATGAAAAATATCCTACTATTTATCATTTACGTAAAAAATTAGTTG | |
| and stop | ATTCTACTGATAAAGCTGATTTACGTTTAATTTATTTAGCTTTAGCTCATATGATTAAATTTCGTGGTCATTTTTTAATTGAAGGT | |
| codons | GATTTAAATCCTGATAATTCTGATGTTGATAAATTATTTATTCAATTAGTTCAAACTTATAATCAATTATTTGAAGAAAATCCTAT | |
| | TAATGCTTCTGGTGTTGATGCTAAAGCTATTTTATCTGCTCGTTTATCTAAATCTCGTCGTTTAGAAAATTTAATTGCTCAATTAC | |
| | CTGGTGAAAAAAAAAATGGTTTATTTGGTAATTTAATTGCTTTATCTTTAGGTTTAACTCCTAATTTTAAATCTAATTTTGATTTA | |
| | GCTGAAGATGCTAAATTACAATTATCTAAAGATACTTATGATGATGATTTAGATAATTTATTAGCTCAAATTGGTGATCAATATGC | |
| | TGATTTATTTTTAGCTGCTAAAAATTTATCTGATGCTATTTTATTATCTGATATTTTACGTGTTAATACTGAAATTACTAAAGCTC | |
| | CTTTATCTGCTTCTATGATTAAACGTTATGATGAACATCATCAAGATTTAACTTTATTAAAAGCTTTAGTTCGTCAACAATTACCT | |
| | GAAAAATATAAAGAAATTTTTTTTGATCAATCTAAAAATGGTTATGCTGGTTATATTGATGGTGGTGCTTCTCAAGAAGAATTTTA | |
| | TAAATTTATTAAACCTATTTTAGAAAAAATGGATGGTACTGAAGAATTATTAGTTAAATTAAATCGTGAAGATTTATTACGTAAAC | |
| | AACGTACTTTTGATAATGGTTCTATTCCTCATCAAATTCATTTAGGTGAATTACATGCTATTTTACGTCGTCAAGAAGATTTTTAT | |
| | CCTTTTTTAAAAGATAATCGTGAAAAAATTGAAAAAATTTTAACTTTTCGTATTCCTTATTATGTTGGTCCTTTAGCTCGTGGTAA | |
| | TTCTCGTTTTGCTTGGATGACTCGTAAATCTGAAGAAACTATTACTCCTTGGAATTTTGAAGAAGTTGTTGATAAAGGTGCTTCTG | |
| | CTCAATCTTTTATTGAACGTATGACTAATTTTGATAAAAATTTACCTAATGAAAAAGTTTTACCTAAACATTCTTTATTATATGAA | |
| | TATTTTACTGTTTATAATGAATTAACTAAAGTTAAATATGTTACTGAAGGTATGCGTAAACCTGCTTTTTTATCTGGTGAACAAAA | |
| | AAAAGCTATTGTTGATTTATTATTTAAAACTAATCGTAAAGTTACTGTTAAACAATTAAAAGAAGATTATTTTAAAAAAATTGAAT | |
| | GTTTTGATTCTGTTGAAATTTCTGGTGTTGAAGATCGTTTTAATGCTTCTTTAGGTACTTATCATGATTTATTAAAAATTATTAAA | |
| | GATAAAGATTTTTTAGATAATGAAGAAAATGAAGATATTTTAGAAGATATTGTTTTAACTTTAACTTTATTTGAAGATCGTGAAAT | |
| | GATTGAAGAACGTTTAAAAACTTATGCTCATTTATTTGATGATAAAGTTATGAAACAATTAAAACGTCGTCGTTATACTGGTTGGG | |
| | GTCGTTTATCTCGTAAATTAATTAATGGTATTCGTGATAAACAATCTGGTAAAACTATTTTAGATTTTTTAAAATCTGATGGTTTT | |
| | GCTAATCGTAATTTTATGCAATTAATTCATGATGATTCTTTAACTTTTAAAGAAGATATTCAAAAAGCTCAAGTTTCTGGTCAAGG | |
| | TGATTCTTTACATGAACATATTGCTAATTTAGCTGGTTCTCCTGCTATTAAAAAAGGTATTTTACAAACTGTTAAAGTTGTTGATG | |
| | AATTAGTTAAAGTTATGGGTCGTCATAAACCTGAAAATATTGTTATTGAAATGGCTCGTGAAAATCAAACTACTCAAAAAGGTCAA | |
| | AAAAATTCTCGTGAACGTATGAAACGTATTGAAGAAGGTATTAAAGAATTAGGTTCTCAAATTTTAAAAGAACATCCTGTTGAAAA | |
| | TACTCAATTACAAAATGAAAAATTATATTTATATTATTTACAAAATGGTCGTGATATGTATGTTGATCAAGAATTAGATATTAATC | |
| | GTTTATCTGATTATGATGTTGATCATATTGTTCCTCAATCTTTTTTAAAAGATGATTCTATTGATAATAAAGTTTTAACTCGTTCT | |
| | GATAAAAATCGTGGTAAATCTGATAATGTTCCTTCTGAAGAAGTTGTTAAAAAAATGAAAAATTATTGGCGTCAATTATTAAATGC | |
| | TAAATTAATTACTCAACGTAAATTTGATAATTTAACTAAAGCTGAACGTGGTGGTTTATCTGAATTAGATAAAGCTGGTTTTATTA | |
| | AACGTCAATTAGTTGAAACTCGTCAAATTACTAAACATGTTGCTCAAATTTTAGATTCTCGTATGAATACTAAATATGATGAAAAT | |
| | GATAAATTAATTCGTGAAGTTAAAGTTATTACTTTAAAATCTAAATTAGTTTCTGATTTTCGTAAAGATTTTCAATTTTATAAAGT | |
| | TCGTGAAATTAATAATTATCATCATGCTCATGATGCTTATTTAAATGCTGTTGTTGGTACTGCTTTAATTAAAAAATATCCTAAAT | |
| | TAGAATCTGAATTTGTTTATGGTGATTATAAAGTTTATGATGTTCGTAAAATGATTGCTAAATCTGAACAAGAAATTGGTAAAGCT | |
| | ACTGCTAAATATTTTTTTTATTCTAATATTATGAATTTTTTTAAAACTGAAATTACTTTAGCTAATGGTGAAATTCGTAAACGTCC | |
| | TTTAATTGAAACTAATGGTGAAACTGGTGAAATTGTTTGGGATAAAGGTCGTGATTTTGCTACTGTTCGTAAAGTTTTATCTATGC | |
| | CTCAAGTTAATATTGTTAAAAAAACTGAAGTTCAAACTGGTGGTTTTTCTAAAGAATCTATTTTACCTAAACGTAATTCTGATAAA | |
| | TTAATTGCTCGTAAAAAAGATTGGGATCCTAAAAAATATGGTGGTTTTGATTCTCCTACTGTTGCTTATTCTGTTTTAGTTGTTGC | |
| | TAAAGTTGAAAAAGGTAAATCTAAAAAATTAAAATCTGTTAAAGAATTATTAGGTATTACTATTATGGAACGTTCTTCTTTTGAAA | |
| | AAAATCCTATTGATTTTTTAGAAGCTAAAGGTTATAAAGAAGTTAAAAAAGATTTAATTATTAAATTACCTAAATATTCTTTATTT | |
| | GAATTAGAAAATGGTCGTAAACGTATGTTAGCTTCTGCTGGTGAATTACAAAAAGGTAATGAATTAGCTTTACCTTCTAAATATGT | |
| | TAATTTTTTATATTTAGCTTCTCATTATGAAAAATTAAAAGGTTCTCCTGAAGATAATGAACAAAAACAATTATTTGTTGAACAAC | |
| | ATAAACATTATTTAGATGAAATTATTGAACAAATTTCTGAATTTTCTAAACGTGTTATTTTAGCTGATGCTAATTTAGATAAAGTT | |
| | TTATCTGCTTATAATAAACATCGTGATAAACCTATTCGTGAACAAGCTGAAAATATTATTCATTTATTTACTTTAACTAATTTAGG | |
| | TGCTCCTGCTGCTTTTAAATATTTTGATACTACTATTGATCGTAAACGTTATACTTCTACTAAAGAAGTTTTAGATGCTACTTTAA | |
| | TTCATCAATCTATTACTGGTTTATATGAAACTCGTATTGATTTATCTCAATTAGGTGGTGATGGTGGTGGTTCTCCTAAAAAAAAA | |
| | CGTAAAGTTTGA | |
| Cas9 ORF | ATGGACAAAAAATACTCCATCGGCCTCGACATCGGCACCAACTCCGTCGGCTGGGCCGTCATCACCGACGAATACAAAGTCCCCTC | 309 |
| using low G | CAAAAAATTCAAAGTCCTCGGCAACACCGACAGACACTCCATCAAAAAAAACCTCATCGGCGCCCTCCTCTTCGACTCCGGCGAAA | |
| codons of | CCGCCGAAGCCACCAGACTCAAAAGAACCGCCAGAAGAAGATACACCAGAAGAAAAAACAGAATCTGCTACCTCCAAGAAATCTTC | |
| Table 4, | TCCAACGAAATGGCCAAAGTCGACGACTCCTTCTTCCACAGACTCGAAGAATCCTTCCTCGTCGAAGAAGACAAAAAACACGAAAG | |
| with start | ACACCCCATCTTCGGCAACATCGTCGACGAAGTCGCCTACCACGAAAAATACCCCACCATCTACCACCTCAGAAAAAAACTCGTCG | |
| and stop | ACTCCACCGACAAAGCCGACCTCAGACTCATCTACCTCGCCCTCGCCCACATGATCAAATTCAGAGGCCACTTCCTCATCGAAGGC | |
| codons | GACCTCAACCCCGACAACTCCGACGTCGACAAACTCTTCATCCAACTCGTCCAAACCTACAACCAACTCTTCGAAGAAAACCCCAT | |
| | CAACGCCTCCGGCGTCGACGCCAAAGCCATCCTCTCCGCCAGACTCTCCAAATCCAGAAGACTCGAAAACCTCATCGCCCAACTCC | |
| | CCGGCGAAAAAAAAAACGGCCTCTTCGGCAACCTCATCGCCCTCTCCCTCGGCCTCACCCCCAACTTCAAATCCAACTTCGACCTC | |
| | GCCGAAGACGCCAAACTCCAACTCTCCAAAGACACCTACGACGACGACCTCGACAACCTCCTCGCCCAAATCGGCGACCAATACGC | |
| | CGACCTCTTCCTCGCCGCCAAAAACCTCTCCGACGCCATCCTCCTCTCCGACATCCTCAGAGTCAACACCGAAATCACCAAAGCCC | |
| | CCCTCTCCGCCTCCATGATCAAAAGATACGACGAACACCACCAAGACCTCACCCTCCTCAAAGCCCTCGTCAGACAACAACTCCCC | |
| | GAAAAATACAAAGAAATCTTCTTCGACCAATCCAAAAACGGCTACGCCGGCTACATCGACGGCGGCGCCTCCCAAGAAGAATTCTA | |
| | CAAATTCATCAAACCCATCCTCGAAAAAATGGACGGCACCGAAGAACTCCTCGTCAAACTCAACAGAGAAGACCTCCTCAGAAAAC | |
| | AAAGAACCTTCGACAACGGCTCCATCCCCCACCAAATCCACCTCGGCGAACTCCACGCCATCCTCAGAAGACAAGAAGACTTCTAC | |
| | CCCTTCCTCAAAGACAACAGAGAAAAAATCGAAAAAATCCTCACCTTCAGAATCCCCTACTACGTCGGCCCCCTCGCCAGAGGCAA | |
| | CTCCAGATTCGCCTGGATGACCAGAAAATCCGAAGAAACCATCACCCCCTGGAACTTCGAAGAAGTCGTCGACAAAGGCGCCTCCG | |
| | CCCAATCCTTCATCGAAAGAATGACCAACTTCGACAAAAACCTCCCCAACGAAAAAGTCCTCCCCAAACACTCCCTCCTCTACGAA | |
| | TACTTCACCGTCTACAACGAACTCACCAAAGTCAAATACGTCACCGAAGGCATGAGAAAACCCGCCTTCCTCTCCGGCGAACAAAA | |
| | AAAAGCCATCGTCGACCTCCTCTTCAAAACCAACAGAAAAGTCACCGTCAAACAACTCAAAGAAGACTACTTCAAAAAAATCGAAT | |
| | GCTTCGACTCCGTCGAAATCTCCGGCGTCGAAGACAGATTCAACGCCTCCCTCGGCACCTACCACGACCTCCTCAAAATCATCAAA | |
| | GACAAAGACTTCCTCGACAACGAAGAAAACGAAGACATCCTCGAAGACATCGTCCTCACCCTCACCCTCTTCGAAGACAGAGAAAT | |
| | GATCGAAGAAAGACTCAAAACCTACGCCCACCTCTTCGACGACAAAGTCATGAAACAACTCAAAAGAAGAAGATACACCGGCTGGG | |
| | GCAGACTCTCCAGAAAACTCATCAACGGCATCAGAGACAAACAATCCGGCAAAACCATCCTCGACTTCCTCAAATCCGACGGCTTC | |
| | GCCAACAGAAACTTCATGCAACTCATCCACGACGACTCCCTCACCTTCAAAGAAGACATCCAAAAAGCCCAAGTCTCCGGCCAAGG | |
| | CGACTCCCTCCACGAACACATCGCCAACCTCGCCGGCTCCCCCGCCATCAAAAAAGGCATCCTCCAAACCGTCAAAGTCGTCGACG | |
| | AACTCGTCAAAGTCATGGGCAGACACAAACCCGAAAACATCGTCATCGAAATGGCCAGAGAAAACCAAACCACCCAAAAAGGCCAA | |
| | AAAAACTCCAGAGAAAGAATGAAAAGAATCGAAGAAGGCATCAAAGAACTCGGCTCCCAAATCCTCAAAGAACACCCCGTCGAAAA | |
| | CACCCAACTCCAAAACGAAAAACTCTACCTCTACTACCTCCAAAACGGCAGAGACATGTACGTCGACCAAGAACTCGACATCAACA | |
| | GACTCTCCGACTACGACGTCGACCACATCGTCCCCCAATCCTTCCTCAAAGACGACTCCATCGACAACAAAGTCCTCACCAGATCC | |
| | GACAAAAACAGAGGCAAATCCGACAACGTCCCCTCCGAAGAAGTCGTCAAAAAAATGAAAAACTACTGGAGACAACTCCTCAACGC | |
| | CAAACTCATCACCCAAAGAAAATTCGACAACCTCACCAAAGCCGAAAGAGGCGGCCTCTCCGAACTCGACAAAGCCGGCTTCATCA | |
| | AAAGACAACTCGTCGAAACCAGACAAATCACCAAACACGTCGCCCAAATCCTCGACTCCAGAATGAACACCAAATACGACGAAAAC | |
| | GACAAACTCATCAGAGAAGTCAAAGTCATCACCCTCAAATCCAAACTCGTCTCCGACTTCAGAAAAGACTTCCAATTCTACAAAGT | |
| | CAGAGAAATCAACAACTACCACCACGCCCACGACGCCTACCTCAACGCCGTCGTCGGCACCGCCCTCATCAAAAAATACCCCAAAC | |
| | TCGAATCCGAATTCGTCTACGGCGACTACAAAGTCTACGACGTCAGAAAAATGATCGCCAAATCCGAACAAGAAATCGGCAAAGCC | |
| | ACCGCCAAATACTTCTTCTACTCCAACATCATGAACTTCTTCAAAACCGAAATCACCCTCGCCAACGGCGAAATCAGAAAAAGACC | |
| | CCTCATCGAAACCAACGGCGAAACCGGCGAAATCGTCTGGGACAAAGGCAGAGACTTCGCCACCGTCAGAAAAGTCCTCTCCATGC | |
| | CCCAAGTCAACATCGTCAAAAAAACCGAAGTCCAAACCGGCGGCTTCTCCAAAGAATCCATCCTCCCCAAAAGAAACTCCGACAAA | |
| | CTCATCGCCAGAAAAAAAGACTGGGACCCCAAAAAATACGGCGGCTTCGACTCCCCCACCGTCGCCTACTCCGTCCTCGTCGTCGC | |
| | CAAAGTCGAAAAAGGCAAATCCAAAAAACTCAAATCCGTCAAAGAACTCCTCGGCATCACCATCATGGAAAGATCCTCCTTCGAAA | |
| | AAAACCCCATCGACTTCCTCGAAGCCAAAGGCTACAAAGAAGTCAAAAAAGACCTCATCATCAAACTCCCCAAATACTCCCTCTTC | |
| | GAACTCGAAAACGGCAGAAAAAGAATGCTCGCCTCCGCCGGCGAACTCCAAAAAGGCAACGAACTCGCCCTCCCCTCCAAATACGT | |
| | CAACTTCCTCTACCTCGCCTCCCACTACGAAAAACTCAAAGGCTCCCCCGAAGACAACGAACAAAAACAACTCTTCGTCGAACAAC | |
| | ACAAACACTACCTCGACGAAATCATCGAACAAATCTCCGAATTCTCCAAAAGAGTCATCCTCGCCGACGCCAACCTCGACAAAGTC | |
| | CTCTCCGCCTACAACAAACACAGAGACAAACCCATCAGAGAACAAGCCGAAAACATCATCCACCTCTTCACCCTCACCAACCTCGG | |
| | CGCCCCCGCCGCCTTCAAATACTTCGACACCACCATCGACAGAAAAAGATACACCTCCACCAAAGAAGTCCTCGACGCCACCCTCA | |
| | TCCACCAATCCATCACCGGCCTCTACGAAACCAGAATCGACCTCTCCCAACTCGGCGGCGACGGCGGCGGCTCCCCCAAAAAAAAA | |
| | AGAAAAGTCTGA | |
| Cas9 ORF | ATGGATAAGAAGTATAGTATTGGATTGGATATTGGAACAAATAGTGTGGGATGGGCTGTGATTACAGATGAGTATAAGGTGCCTAG | 310 |
| using low C | TAAGAAGTTTAAGGTGTTGGGAAATACAGATAGACATAGTATTAAGAAGAATTTGATTGGAGCTTTGTTGTTTGATAGTGGAGAGA | |
| codons of | CAGCTGAGGCTACAAGATTGAAGAGAACAGCTAGAAGAAGATATACAAGAAGAAAGAATAGAATTTGTTATTTGCAGGAGATTTTT | |
| Table 4, | AGTAATGAGATGGCTAAGGTGGATGATAGTTTTTTTCATAGATTGGAGGAGAGTTTTTTGGTGGAGGAGGATAAGAAGCATGAGAG | |
| with start | ACATCCTATTTTTGGAAATATTGTGGATGAGGTGGCTTATCATGAGAAGTATCCTACAATTTATCATTTGAGAAAGAAGTTGGTGG | |
| and stop | ATAGTACAGATAAGGCTGATTTGAGATTGATTTATTTGGCTTTGGCTCATATGATTAAGTTTAGAGGACATTTTTTGATTGAGGGA | |
| codons | GATTTGAATCCTGATAATAGTGATGTGGATAAGTTGTTTATTCAGTTGGTGCAGACATATAATCAGTTGTTTGAGGAGAATCCTAT | |
| | TAATGCTAGTGGAGTGGATGCTAAGGCTATTTTGAGTGCTAGATTGAGTAAGAGTAGAAGATTGGAGAATTTGATTGCTCAGTTGC | |
| | CTGGAGAGAAGAAGAATGGATTGTTTGGAAATTTGATTGCTTTGAGTTTGGGATTGACACCTAATTTTAAGAGTAATTTTGATTTG | |
| | GCTGAGGATGCTAAGTTGCAGTTGAGTAAGGATACATATGATGATGATTTGGATAATTTGTTGGCTCAGATTGGAGATCAGTATGC | |
| | TGATTTGTTTTTGGCTGCTAAGAATTTGAGTGATGCTATTTTGTTGAGTGATATTTTGAGAGTGAATACAGAGATTACAAAGGCTC | |
| | CTTTGAGTGCTAGTATGATTAAGAGATATGATGAGCATCATCAGGATTTGACATTGTTGAAGGCTTTGGTGAGACAGCAGTTGCCT | |
| | GAGAAGTATAAGGAGATTTTTTTTGATCAGAGTAAGAATGGATATGCTGGATATATTGATGGAGGAGCTAGTCAGGAGGAGTTTTA | |
| | TAAGTTTATTAAGCCTATTTTGGAGAAGATGGATGGAACAGAGGAGTTGTTGGTGAAGTTGAATAGAGAGGATTTGTTGAGAAAGC | |
| | AGAGAACATTTGATAATGGAAGTATTCCTCATCAGATTCATTTGGGAGAGTTGCATGCTATTTTGAGAAGACAGGAGGATTTTTAT | |
| | CCTTTTTTGAAGGATAATAGAGAGAAGATTGAGAAGATTTTGACATTTAGAATTCCTTATTATGTGGGACCTTTGGCTAGAGGAAA | |
| | TAGTAGATTTGCTTGGATGACAAGAAAGAGTGAGGAGACAATTACACCTTGGAATTTTGAGGAGGTGGTGGATAAGGGAGCTAGTG | |
| | CTCAGAGTTTTATTGAGAGAATGACAAATTTTGATAAGAATTTGCCTAATGAGAAGGTGTTGCCTAAGCATAGTTTGTTGTATGAG | |
| | TATTTTACAGTGTATAATGAGTTGACAAAGGTGAAGTATGTGACAGAGGGAATGAGAAAGCCTGCTTTTTTGAGTGGAGAGCAGAA | |
| | GAAGGCTATTGTGGATTTGTTGTTTAAGACAAATAGAAAGGTGACAGTGAAGCAGTTGAAGGAGGATTATTTTAAGAAGATTGAGT | |
| | GTTTTGATAGTGTGGAGATTAGTGGAGTGGAGGATAGATTTAATGCTAGTTTGGGAACATATCATGATTTGTTGAAGATTATTAAG | |
| | GATAAGGATTTTTTGGATAATGAGGAGAATGAGGATATTTTGGAGGATATTGTGTTGACATTGACATTGTTTGAGGATAGAGAGAT | |
| | GATTGAGGAGAGATTGAAGACATATGCTCATTTGTTTGATGATAAGGTGATGAAGCAGTTGAAGAGAAGAAGATATACAGGATGGG | |
| | GAAGATTGAGTAGAAAGTTGATTAATGGAATTAGAGATAAGCAGAGTGGAAAGACAATTTTGGATTTTTTGAAGAGTGATGGATTT | |
| | GCTAATAGAAATTTTATGCAGTTGATTCATGATGATAGTTTGACATTTAAGGAGGATATTCAGAAGGCTCAGGTGAGTGGACAGGG | |
| | AGATAGTTTGCATGAGCATATTGCTAATTTGGCTGGAAGTCCTGCTATTAAGAAGGGAATTTTGCAGACAGTGAAGGTGGTGGATG | |
| | AGTTGGTGAAGGTGATGGGAAGACATAAGCCTGAGAATATTGTGATTGAGATGGCTAGAGAGAATCAGACAACACAGAAGGGACAG | |
| | AAGAATAGTAGAGAGAGAATGAAGAGAATTGAGGAGGGAATTAAGGAGTTGGGAAGTCAGATTTTGAAGGAGCATCCTGTGGAGAA | |
| | TACACAGTTGCAGAATGAGAAGTTGTATTTGTATTATTTGCAGAATGGAAGAGATATGTATGTGGATCAGGAGTTGGATATTAATA | |
| | GATTGAGTGATTATGATGTGGATCATATTGTGCCTCAGAGTTTTTTGAAGGATGATAGTATTGATAATAAGGTGTTGACAAGAAGT | |
| | GATAAGAATAGAGGAAAGAGTGATAATGTGCCTAGTGAGGAGGTGGTGAAGAAGATGAAGAATTATTGGAGACAGTTGTTGAATGC | |
| | TAAGTTGATTACACAGAGAAAGTTTGATAATTTGACAAAGGCTGAGAGAGGAGGATTGAGTGAGTTGGATAAGGCTGGATTTATTA | |
| | AGAGACAGTTGGTGGAGACAAGACAGATTACAAAGCATGTGGCTCAGATTTTGGATAGTAGAATGAATACAAAGTATGATGAGAAT | |
| | GATAAGTTGATTAGAGAGGTGAAGGTGATTACATTGAAGAGTAAGTTGGTGAGTGATTTTAGAAAGGATTTTCAGTTTTATAAGGT | |
| | GAGAGAGATTAATAATTATCATCATGCTCATGATGCTTATTTGAATGCTGTGGTGGGAACAGCTTTGATTAAGAAGTATCCTAAGT | |
| | TGGAGAGTGAGTTTGTGTATGGAGATTATAAGGTGTATGATGTGAGAAAGATGATTGCTAAGAGTGAGCAGGAGATTGGAAAGGCT | |
| | ACAGCTAAGTATTTTTTTTATAGTAATATTATGAATTTTTTTAAGACAGAGATTACATTGGCTAATGGAGAGATTAGAAAGAGACC | |
| | TTTGATTGAGACAAATGGAGAGACAGGAGAGATTGTGTGGGATAAGGGAAGAGATTTTGCTACAGTGAGAAAGGTGTTGAGTATGC | |
| | CTCAGGTGAATATTGTGAAGAAGACAGAGGTGCAGACAGGAGGATTTAGTAAGGAGAGTATTTTGCCTAAGAGAAATAGTGATAAG | |
| | TTGATTGCTAGAAAGAAGGATTGGGATCCTAAGAAGTATGGAGGATTTGATAGTCCTACAGTGGCTTATAGTGTGTTGGTGGTGGC | |
| | TAAGGTGGAGAAGGGAAAGAGTAAGAAGTTGAAGAGTGTGAAGGAGTTGTTGGGAATTACAATTATGGAGAGAAGTAGTTTTGAGA | |
| | AGAATCCTATTGATTTTTTGGAGGCTAAGGGATATAAGGAGGTGAAGAAGGATTTGATTATTAAGTTGCCTAAGTATAGTTTGTTT | |
| | GAGTTGGAGAATGGAAGAAAGAGAATGTTGGCTAGTGCTGGAGAGTTGCAGAAGGGAAATGAGTTGGCTTTGCCTAGTAAGTATGT | |
| | GAATTTTTTGTATTTGGCTAGTCATTATGAGAAGTTGAAGGGAAGTCCTGAGGATAATGAGCAGAAGCAGTTGTTTGTGGAGCAGC | |
| | ATAAGCATTATTTGGATGAGATTATTGAGCAGATTAGTGAGTTTAGTAAGAGAGTGATTTTGGCTGATGCTAATTTGGATAAGGTG | |
| | TTGAGTGCTTATAATAAGCATAGAGATAAGCCTATTAGAGAGCAGGCTGAGAATATTATTCATTTGTTTACATTGACAAATTTGGG | |
| | AGCTCCTGCTGCTTTTAAGTATTTTGATACAACAATTGATAGAAAGAGATATACAAGTACAAAGGAGGTGTTGGATGCTACATTGA | |
| | TTCATCAGAGTATTACAGGATTGTATGAGACAAGAATTGATTTGAGTCAGTTGGGAGGAGATGGAGGAGGAAGTCCTAAGAAGAAG | |
| | AGAAAGGTGTGA | |
| Cas9 ORF | ATGGACAAGAAGTACTCCATCGGCCTGGACATCGGCACCAACTCCGTGGGCTGGGCCGTGATCACCGACGAGTACAAGGTGCCCTC | 311 |
| using low A | CAAGAAGTTCAAGGTGCTGGGCAACACCGACCGGCACTCCATCAAGAAGAACCTGATCGGCGCCCTGCTGTTCGACTCCGGCGAGA | |
| codons of | CCGCCGAGGCCACCCGGCTGAAGCGGACCGCCCGGCGGCGGTACACCCGGCGGAAGAACCGGATCTGCTACCTGCAGGAGATCTTC | |
| Table 4, | TCCAACGAGATGGCCAAGGTGGACGACTCCTTCTTCCACCGGCTGGAGGAGTCCTTCCTGGTGGAGGAGGACAAGAAGCACGAGCG | |
| with start | GCACCCCATCTTCGGCAACATCGTGGACGAGGTGGCCTACCACGAGAAGTACCCCACCATCTACCACCTGCGGAAGAAGCTGGTGG | |
| and stop | ACTCCACCGACAAGGCCGACCTGCGGCTGATCTACCTGGCCCTGGCCCACATGATCAAGTTCCGGGGCCACTTCCTGATCGAGGGC | |
| codons | GACCTGAACCCCGACAACTCCGACGTGGACAAGCTGTTCATCCAGCTGGTGCAGACCTACAACCAGCTGTTCGAGGAGAACCCCAT | |
| | CAACGCCTCCGGCGTGGACGCCAAGGCCATCCTGTCCGCCCGGCTGTCCAAGTCCCGGCGGCTGGAGAACCTGATCGCCCAGCTGC | |
| | CCGGCGAGAAGAAGAACGGCCTGTTCGGCAACCTGATCGCCCTGTCCCTGGGCCTGACCCCCAACTTCAAGTCCAACTTCGACCTG | |
| | GCCGAGGACGCCAAGCTGCAGCTGTCCAAGGACACCTACGACGACGACCTGGACAACCTGCTGGCCCAGATCGGCGACCAGTACGC | |
| | CGACCTGTTCCTGGCCGCCAAGAACCTGTCCGACGCCATCCTGCTGTCCGACATCCTGCGGGTGAACACCGAGATCACCAAGGCCC | |
| | CCCTGTCCGCCTCCATGATCAAGCGGTACGACGAGCACCACCAGGACCTGACCCTGCTGAAGGCCCTGGTGCGGCAGCAGCTGCCC | |
| | GAGAAGTACAAGGAGATCTTCTTCGACCAGTCCAAGAACGGCTACGCCGGCTACATCGACGGCGGCGCCTCCCAGGAGGAGTTCTA | |
| | CAAGTTCATCAAGCCCATCCTGGAGAAGATGGACGGCACCGAGGAGCTGCTGGTGAAGCTGAACCGGGAGGACCTGCTGCGGAAGC | |
| | AGCGGACCTTCGACAACGGCTCCATCCCCCACCAGATCCACCTGGGCGAGCTGCACGCCATCCTGCGGCGGCAGGAGGACTTCTAC | |
| | CCCTTCCTGAAGGACAACCGGGAGAAGATCGAGAAGATCCTGACCTTCCGGATCCCCTACTACGTGGGCCCCCTGGCCCGGGGCAA | |
| | CTCCCGGTTCGCCTGGATGACCCGGAAGTCCGAGGAGACCATCACCCCCTGGAACTTCGAGGAGGTGGTGGACAAGGGCGCCTCCG | |
| | CCCAGTCCTTCATCGAGCGGATGACCAACTTCGACAAGAACCTGCCCAACGAGAAGGTGCTGCCCAAGCACTCCCTGCTGTACGAG | |
| | TACTTCACCGTGTACAACGAGCTGACCAAGGTGAAGTACGTGACCGAGGGCATGCGGAAGCCCGCCTTCCTGTCCGGCGAGCAGAA | |
| | GAAGGCCATCGTGGACCTGCTGTTCAAGACCAACCGGAAGGTGACCGTGAAGCAGCTGAAGGAGGACTACTTCAAGAAGATCGAGT | |
| | GCTTCGACTCCGTGGAGATCTCCGGCGTGGAGGACCGGTTCAACGCCTCCCTGGGCACCTACCACGACCTGCTGAAGATCATCAAG | |
| | GACAAGGACTTCCTGGACAACGAGGAGAACGAGGACATCCTGGAGGACATCGTGCTGACCCTGACCCTGTTCGAGGACCGGGAGAT | |
| | GATCGAGGAGCGGCTGAAGACCTACGCCCACCTGTTCGACGACAAGGTGATGAAGCAGCTGAAGCGGCGGCGGTACACCGGCTGGG | |
| | GCCGGCTGTCCCGGAAGCTGATCAACGGCATCCGGGACAAGCAGTCCGGCAAGACCATCCTGGACTTCCTGAAGTCCGACGGCTTC | |
| | GCCAACCGGAACTTCATGCAGCTGATCCACGACGACTCCCTGACCTTCAAGGAGGACATCCAGAAGGCCCAGGTGTCCGGCCAGGG | |
| | CGACTCCCTGCACGAGCACATCGCCAACCTGGCCGGCTCCCCCGCCATCAAGAAGGGCATCCTGCAGACCGTGAAGGTGGTGGACG | |
| | AGCTGGTGAAGGTGATGGGCCGGCACAAGCCCGAGAACATCGTGATCGAGATGGCCCGGGAGAACCAGACCACCCAGAAGGGCCAG | |
| | AAGAACTCCCGGGAGCGGATGAAGCGGATCGAGGAGGGCATCAAGGAGCTGGGCTCCCAGATCCTGAAGGAGCACCCCGTGGAGAA | |
| | CACCCAGCTGCAGAACGAGAAGCTGTACCTGTACTACCTGCAGAACGGCCGGGACATGTACGTGGACCAGGAGCTGGACATCAACC | |
| | GGCTGTCCGACTACGACGTGGACCACATCGTGCCCCAGTCCTTCCTGAAGGACGACTCCATCGACAACAAGGTGCTGACCCGGTCC | |
| | GACAAGAACCGGGGCAAGTCCGACAACGTGCCCTCCGAGGAGGTGGTGAAGAAGATGAAGAACTACTGGCGGCAGCTGCTGAACGC | |
| | CAAGCTGATCACCCAGCGGAAGTTCGACAACCTGACCAAGGCCGAGCGGGGCGGCCTGTCCGAGCTGGACAAGGCCGGCTTCATCA | |
| | AGCGGCAGCTGGTGGAGACCCGGCAGATCACCAAGCACGTGGCCCAGATCCTGGACTCCCGGATGAACACCAAGTACGACGAGAAC | |
| | GACAAGCTGATCCGGGAGGTGAAGGTGATCACCCTGAAGTCCAAGCTGGTGTCCGACTTCCGGAAGGACTTCCAGTTCTACAAGGT | |
| | GCGGGAGATCAACAACTACCACCACGCCCACGACGCCTACCTGAACGCCGTGGTGGGCACCGCCCTGATCAAGAAGTACCCCAAGC | |
| | TGGAGTCCGAGTTCGTGTACGGCGACTACAAGGTGTACGACGTGCGGAAGATGATCGCCAAGTCCGAGCAGGAGATCGGCAAGGCC | |
| | ACCGCCAAGTACTTCTTCTACTCCAACATCATGAACTTCTTCAAGACCGAGATCACCCTGGCCAACGGCGAGATCCGGAAGCGGCC | |
| | CCTGATCGAGACCAACGGCGAGACCGGCGAGATCGTGTGGGACAAGGGCCGGGACTTCGCCACCGTGCGGAAGGTGCTGTCCATGC | |
| | CCCAGGTGAACATCGTGAAGAAGACCGAGGTGCAGACCGGCGGCTTCTCCAAGGAGTCCATCCTGCCCAAGCGGAACTCCGACAAG | |
| | CTGATCGCCCGGAAGAAGGACTGGGACCCCAAGAAGTACGGCGGCTTCGACTCCCCCACCGTGGCCTACTCCGTGCTGGTGGTGGC | |
| | CAAGGTGGAGAAGGGCAAGTCCAAGAAGCTGAAGTCCGTGAAGGAGCTGCTGGGCATCACCATCATGGAGCGGTCCTCCTTCGAGA | |
| | AGAACCCCATCGACTTCCTGGAGGCCAAGGGCTACAAGGAGGTGAAGAAGGACCTGATCATCAAGCTGCCCAAGTACTCCCTGTTC | |
| | GAGCTGGAGAACGGCCGGAAGCGGATGCTGGCCTCCGCCGGCGAGCTGCAGAAGGGCAACGAGCTGGCCCTGCCCTCCAAGTACGT | |
| | GAACTTCCTGTACCTGGCCTCCCACTACGAGAAGCTGAAGGGCTCCCCCGAGGACAACGAGCAGAAGCAGCTGTTCGTGGAGCAGC | |
| | ACAAGCACTACCTGGACGAGATCATCGAGCAGATCTCCGAGTTCTCCAAGCGGGTGATCCTGGCCGACGCCAACCTGGACAAGGTG | |
| | CTGTCCGCCTACAACAAGCACCGGGACAAGCCCATCCGGGAGCAGGCCGAGAACATCATCCACCTGTTCACCCTGACCAACCTGGG | |
| | CGCCCCCGCCGCCTTCAAGTACTTCGACACCACCATCGACCGGAAGCGGTACACCTCCACCAAGGAGGTGCTGGACGCCACCCTGA | |
| | TCCACCAGTCCATCACCGGCCTGTACGAGACCCGGATCGACCTGTCCCAGCTGGGCGGCGACGGCGGCGGCTCCCCCAAGAAGAAG | |
| | CGGAAGGTGTGA | |
| Cas9 ORF | ATGGACAAGAAGTACAGCATCGGCCTGGACATCGGCACCAACAGCGTGGGCTGGGCCGTGATCACCGACGAGTACAAGGTGCCCAG | 312 |
| using low | CAAGAAGTTCAAGGTGCTGGGCAACACCGACCGGCACAGCATCAAGAAGAACCTGATCGGCGCCCTGCTGTTCGACAGCGGCGAGA | |
| A/U codons | CCGCCGAGGCCACCCGGCTGAAGCGGACCGCCCGGCGGCGGTACACCCGGCGGAAGAACCGGATCTGCTACCTGCAGGAGATCTTC | |
| of Table 4, | AGCAACGAGATGGCCAAGGTGGACGACAGCTTCTTCCACCGGCTGGAGGAGAGCTTCCTGGTGGAGGAGGACAAGAAGCACGAGCG | |
| with start | GCACCCCATCTTCGGCAACATCGTGGACGAGGTGGCCTACCACGAGAAGTACCCCACCATCTACCACCTGCGGAAGAAGCTGGTGG | |
| and stop | ACAGCACCGACAAGGCCGACCTGCGGCTGATCTACCTGGCCCTGGCCCACATGATCAAGTTCCGGGGCCACTTCCTGATCGAGGGC | |
| codons | GACCTGAACCCCGACAACAGCGACGTGGACAAGCTGTTCATCCAGCTGGTGCAGACCTACAACCAGCTGTTCGAGGAGAACCCCAT | |
| | CAACGCCAGCGGCGTGGACGCCAAGGCCATCCTGAGCGCCCGGCTGAGCAAGAGCCGGCGGCTGGAGAACCTGATCGCCCAGCTGC | |
| | CCGGCGAGAAGAAGAACGGCCTGTTCGGCAACCTGATCGCCCTGAGCCTGGGCCTGACCCCCAACTTCAAGAGCAACTTCGACCTG | |
| | GCCGAGGACGCCAAGCTGCAGCTGAGCAAGGACACCTACGACGACGACCTGGACAACCTGCTGGCCCAGATCGGCGACCAGTACGC | |
| | CGACCTGTTCCTGGCCGCCAAGAACCTGAGCGACGCCATCCTGCTGAGCGACATCCTGCGGGTGAACACCGAGATCACCAAGGCCC | |
| | CCCTGAGCGCCAGCATGATCAAGCGGTACGACGAGCACCACCAGGACCTGACCCTGCTGAAGGCCCTGGTGCGGCAGCAGCTGCCC | |
| | GAGAAGTACAAGGAGATCTTCTTCGACCAGAGCAAGAACGGCTACGCCGGCTACATCGACGGCGGCGCCAGCCAGGAGGAGTTCTA | |
| | CAAGTTCATCAAGCCCATCCTGGAGAAGATGGACGGCACCGAGGAGCTGCTGGTGAAGCTGAACCGGGAGGACCTGCTGCGGAAGC | |
| | AGCGGACCTTCGACAACGGCAGCATCCCCCACCAGATCCACCTGGGCGAGCTGCACGCCATCCTGCGGCGGCAGGAGGACTTCTAC | |
| | CCCTTCCTGAAGGACAACCGGGAGAAGATCGAGAAGATCCTGACCTTCCGGATCCCCTACTACGTGGGCCCCCTGGCCCGGGGCAA | |
| | CAGCCGGTTCGCCTGGATGACCCGGAAGAGCGAGGAGACCATCACCCCCTGGAACTTCGAGGAGGTGGTGGACAAGGGCGCCAGCG | |
| | CCCAGAGCTTCATCGAGCGGATGACCAACTTCGACAAGAACCTGCCCAACGAGAAGGTGCTGCCCAAGCACAGCCTGCTGTACGAG | |
| | TACTTCACCGTGTACAACGAGCTGACCAAGGTGAAGTACGTGACCGAGGGCATGCGGAAGCCCGCCTTCCTGAGCGGCGAGCAGAA | |
| | GAAGGCCATCGTGGACCTGCTGTTCAAGACCAACCGGAAGGTGACCGTGAAGCAGCTGAAGGAGGACTACTTCAAGAAGATCGAGT | |
| | GCTTCGACAGCGTGGAGATCAGCGGCGTGGAGGACCGGTTCAACGCCAGCCTGGGCACCTACCACGACCTGCTGAAGATCATCAAG | |
| | GACAAGGACTTCCTGGACAACGAGGAGAACGAGGACATCCTGGAGGACATCGTGCTGACCCTGACCCTGTTCGAGGACCGGGAGAT | |
| | GATCGAGGAGCGGCTGAAGACCTACGCCCACCTGTTCGACGACAAGGTGATGAAGCAGCTGAAGCGGCGGCGGTACACCGGCTGGG | |
| | GCCGGCTGAGCCGGAAGCTGATCAACGGCATCCGGGACAAGCAGAGCGGCAAGACCATCCTGGACTTCCTGAAGAGCGACGGCTTC | |
| | GCCAACCGGAACTTCATGCAGCTGATCCACGACGACAGCCTGACCTTCAAGGAGGACATCCAGAAGGCCCAGGTGAGCGGCCAGGG | |
| | CGACAGCCTGCACGAGCACATCGCCAACCTGGCCGGCAGCCCCGCCATCAAGAAGGGCATCCTGCAGACCGTGAAGGTGGTGGACG | |
| | AGCTGGTGAAGGTGATGGGCCGGCACAAGCCCGAGAACATCGTGATCGAGATGGCCCGGGAGAACCAGACCACCCAGAAGGGCCAG | |
| | AAGAACAGCCGGGAGCGGATGAAGCGGATCGAGGAGGGCATCAAGGAGCTGGGCAGCCAGATCCTGAAGGAGCACCCCGTGGAGAA | |
| | CACCCAGCTGCAGAACGAGAAGCTGTACCTGTACTACCTGCAGAACGGCCGGGACATGTACGTGGACCAGGAGCTGGACATCAACC | |
| | GGCTGAGCGACTACGACGTGGACCACATCGTGCCCCAGAGCTTCCTGAAGGACGACAGCATCGACAACAAGGTGCTGACCCGGAGC | |
| | GACAAGAACCGGGGCAAGAGCGACAACGTGCCCAGCGAGGAGGTGGTGAAGAAGATGAAGAACTACTGGCGGCAGCTGCTGAACGC | |
| | CAAGCTGATCACCCAGCGGAAGTTCGACAACCTGACCAAGGCCGAGCGGGGCGGCCTGAGCGAGCTGGACAAGGCCGGCTTCATCA | |
| | AGCGGCAGCTGGTGGAGACCCGGCAGATCACCAAGCACGTGGCCCAGATCCTGGACAGCCGGATGAACACCAAGTACGACGAGAAC | |
| | GACAAGCTGATCCGGGAGGTGAAGGTGATCACCCTGAAGAGCAAGCTGGTGAGCGACTTCCGGAAGGACTTCCAGTTCTACAAGGT | |
| | GCGGGAGATCAACAACTACCACCACGCCCACGACGCCTACCTGAACGCCGTGGTGGGCACCGCCCTGATCAAGAAGTACCCCAAGC | |
| | TGGAGAGCGAGTTCGTGTACGGCGACTACAAGGTGTACGACGTGCGGAAGATGATCGCCAAGAGCGAGCAGGAGATCGGCAAGGCC | |
| | ACCGCCAAGTACTTCTTCTACAGCAACATCATGAACTTCTTCAAGACCGAGATCACCCTGGCCAACGGCGAGATCCGGAAGCGGCC | |
| | CCTGATCGAGACCAACGGCGAGACCGGCGAGATCGTGTGGGACAAGGGCCGGGACTTCGCCACCGTGCGGAAGGTGCTGAGCATGC | |
| | CCCAGGTGAACATCGTGAAGAAGACCGAGGTGCAGACCGGCGGCTTCAGCAAGGAGAGCATCCTGCCCAAGCGGAACAGCGACAAG | |
| | CTGATCGCCCGGAAGAAGGACTGGGACCCCAAGAAGTACGGCGGCTTCGACAGCCCCACCGTGGCCTACAGCGTGCTGGTGGTGGC | |
| | CAAGGTGGAGAAGGGCAAGAGCAAGAAGCTGAAGAGCGTGAAGGAGCTGCTGGGCATCACCATCATGGAGCGGAGCAGCTTCGAGA | |
| | AGAACCCCATCGACTTCCTGGAGGCCAAGGGCTACAAGGAGGTGAAGAAGGACCTGATCATCAAGCTGCCCAAGTACAGCCTGTTC | |
| | GAGCTGGAGAACGGCCGGAAGCGGATGCTGGCCAGCGCCGGCGAGCTGCAGAAGGGCAACGAGCTGGCCCTGCCCAGCAAGTACGT | |
| | GAACTTCCTGTACCTGGCCAGCCACTACGAGAAGCTGAAGGGCAGCCCCGAGGACAACGAGCAGAAGCAGCTGTTCGTGGAGCAGC | |
| | ACAAGCACTACCTGGACGAGATCATCGAGCAGATCAGCGAGTTCAGCAAGCGGGTGATCCTGGCCGACGCCAACCTGGACAAGGTG | |
| | CTGAGCGCCTACAACAAGCACCGGGACAAGCCCATCCGGGAGCAGGCCGAGAACATCATCCACCTGTTCACCCTGACCAACCTGGG | |
| | CGCCCCCGCCGCCTTCAAGTACTTCGACACCACCATCGACCGGAAGCGGTACACCAGCACCAAGGAGGTGCTGGACGCCACCCTGA | |
| | TCCACCAGAGCATCACCGGCCTGTACGAGACCCGGATCGACCTGAGCCAGCTGGGCGGCGACGGCGGCGGCAGCCCCAAGAAGAAG | |
| | CGGAAGGTGTGA | |
| Cas9 ORF | ATGGACAAGAAGTACTCCATCGGCCTGGACATCGGCACCAACTCCGTGGGCTGGGCCGTGATCACCGACGAGTACAAGGTGCCCTC | 313 |
| using low A | CAAGAAGTTCAAGGTGCTGGGCAACACCGACCGGCACTCCATCAAGAAGAACCTGATCGGCGCCCTGCTGTTCGACTCCGGCGAGA | |
| codons of | CCGCCGAGGCCACCCGGCTGAAGCGGACCGCCCGGCGGCGGTACACCCGGCGGAAGAACCGGATCTGCTACCTGCAGGAGATCTTC | |
| Table 4, | TCCAACGAGATGGCCAAGGTGGACGACTCCTTCTTCCACCGGCTGGAGGAGTCCTTCCTGGTGGAGGAGGACAAGAAGCACGAGCG | |
| with two C- | GCACCCCATCTTCGGCAACATCGTGGACGAGGTGGCCTACCACGAGAAGTACCCCACCATCTACCACCTGCGGAAGAAGCTGGTGG | |
| terminal NLS | ACTCCACCGACAAGGCCGACCTGCGGCTGATCTACCTGGCCCTGGCCCACATGATCAAGTTCCGGGGCCACTTCCTGATCGAGGGC | |
| sequences | GACCTGAACCCCGACAACTCCGACGTGGACAAGCTGTTCATCCAGCTGGTGCAGACCTACAACCAGCTGTTCGAGGAGAACCCCAT | |
| and start | CAACGCCTCCGGCGTGGACGCCAAGGCCATCCTGTCCGCCCGGCTGTCCAAGTCCCGGCGGCTGGAGAACCTGATCGCCCAGCTGC | |
| and stop | CCGGCGAGAAGAAGAACGGCCTGTTCGGCAACCTGATCGCCCTGTCCCTGGGCCTGACCCCCAACTTCAAGTCCAACTTCGACCTG | |
| codons | GCCGAGGACGCCAAGCTGCAGCTGTCCAAGGACACCTACGACGACGACCTGGACAACCTGCTGGCCCAGATCGGCGACCAGTACGC | |
| | CGACCTGTTCCTGGCCGCCAAGAACCTGTCCGACGCCATCCTGCTGTCCGACATCCTGCGGGTGAACACCGAGATCACCAAGGCCC | |
| | CCCTGTCCGCCTCCATGATCAAGCGGTACGACGAGCACCACCAGGACCTGACCCTGCTGAAGGCCCTGGTGCGGCAGCAGCTGCCC | |
| | GAGAAGTACAAGGAGATCTTCTTCGACCAGTCCAAGAACGGCTACGCCGGCTACATCGACGGCGGCGCCTCCCAGGAGGAGTTCTA | |
| | CAAGTTCATCAAGCCCATCCTGGAGAAGATGGACGGCACCGAGGAGCTGCTGGTGAAGCTGAACCGGGAGGACCTGCTGCGGAAGC | |
| | AGCGGACCTTCGACAACGGCTCCATCCCCCACCAGATCCACCTGGGCGAGCTGCACGCCATCCTGCGGCGGCAGGAGGACTTCTAC | |
| | CCCTTCCTGAAGGACAACCGGGAGAAGATCGAGAAGATCCTGACCTTCCGGATCCCCTACTACGTGGGCCCCCTGGCCCGGGGCAA | |
| | CTCCCGGTTCGCCTGGATGACCCGGAAGTCCGAGGAGACCATCACCCCCTGGAACTTCGAGGAGGTGGTGGACAAGGGCGCCTCCG | |
| | CCCAGTCCTTCATCGAGCGGATGACCAACTTCGACAAGAACCTGCCCAACGAGAAGGTGCTGCCCAAGCACTCCCTGCTGTACGAG | |
| | TACTTCACCGTGTACAACGAGCTGACCAAGGTGAAGTACGTGACCGAGGGCATGCGGAAGCCCGCCTTCCTGTCCGGCGAGCAGAA | |
| | GAAGGCCATCGTGGACCTGCTGTTCAAGACCAACCGGAAGGTGACCGTGAAGCAGCTGAAGGAGGACTACTTCAAGAAGATCGAGT | |
| | GCTTCGACTCCGTGGAGATCTCCGGCGTGGAGGACCGGTTCAACGCCTCCCTGGGCACCTACCACGACCTGCTGAAGATCATCAAG | |
| | GACAAGGACTTCCTGGACAACGAGGAGAACGAGGACATCCTGGAGGACATCGTGCTGACCCTGACCCTGTTCGAGGACCGGGAGAT | |
| | GATCGAGGAGCGGCTGAAGACCTACGCCCACCTGTTCGACGACAAGGTGATGAAGCAGCTGAAGCGGCGGCGGTACACCGGCTGGG | |
| | GCCGGCTGTCCCGGAAGCTGATCAACGGCATCCGGGACAAGCAGTCCGGCAAGACCATCCTGGACTTCCTGAAGTCCGACGGCTTC | |
| | GCCAACCGGAACTTCATGCAGCTGATCCACGACGACTCCCTGACCTTCAAGGAGGACATCCAGAAGGCCCAGGTGTCCGGCCAGGG | |
| | CGACTCCCTGCACGAGCACATCGCCAACCTGGCCGGCTCCCCCGCCATCAAGAAGGGCATCCTGCAGACCGTGAAGGTGGTGGACG | |
| | AGCTGGTGAAGGTGATGGGCCGGCACAAGCCCGAGAACATCGTGATCGAGATGGCCCGGGAGAACCAGACCACCCAGAAGGGCCAG | |
| | AAGAACTCCCGGGAGCGGATGAAGCGGATCGAGGAGGGCATCAAGGAGCTGGGCTCCCAGATCCTGAAGGAGCACCCCGTGGAGAA | |
| | CACCCAGCTGCAGAACGAGAAGCTGTACCTGTACTACCTGCAGAACGGCCGGGACATGTACGTGGACCAGGAGCTGGACATCAACC | |
| | GGCTGTCCGACTACGACGTGGACCACATCGTGCCCCAGTCCTTCCTGAAGGACGACTCCATCGACAACAAGGTGCTGACCCGGTCC | |
| | GACAAGAACCGGGGCAAGTCCGACAACGTGCCCTCCGAGGAGGTGGTGAAGAAGATGAAGAACTACTGGCGGCAGCTGCTGAACGC | |
| | CAAGCTGATCACCCAGCGGAAGTTCGACAACCTGACCAAGGCCGAGCGGGGCGGCCTGTCCGAGCTGGACAAGGCCGGCTTCATCA | |
| | AGCGGCAGCTGGTGGAGACCCGGCAGATCACCAAGCACGTGGCCCAGATCCTGGACTCCCGGATGAACACCAAGTACGACGAGAAC | |
| | GACAAGCTGATCCGGGAGGTGAAGGTGATCACCCTGAAGTCCAAGCTGGTGTCCGACTTCCGGAAGGACTTCCAGTTCTACAAGGT | |
| | GCGGGAGATCAACAACTACCACCACGCCCACGACGCCTACCTGAACGCCGTGGTGGGCACCGCCCTGATCAAGAAGTACCCCAAGC | |
| | TGGAGTCCGAGTTCGTGTACGGCGACTACAAGGTGTACGACGTGCGGAAGATGATCGCCAAGTCCGAGCAGGAGATCGGCAAGGCC | |
| | ACCGCCAAGTACTTCTTCTACTCCAACATCATGAACTTCTTCAAGACCGAGATCACCCTGGCCAACGGCGAGATCCGGAAGCGGCC | |
| | CCTGATCGAGACCAACGGCGAGACCGGCGAGATCGTGTGGGACAAGGGCCGGGACTTCGCCACCGTGCGGAAGGTGCTGTCCATGC | |
| | CCCAGGTGAACATCGTGAAGAAGACCGAGGTGCAGACCGGCGGCTTCTCCAAGGAGTCCATCCTGCCCAAGCGGAACTCCGACAAG | |
| | CTGATCGCCCGGAAGAAGGACTGGGACCCCAAGAAGTACGGCGGCTTCGACTCCCCCACCGTGGCCTACTCCGTGCTGGTGGTGGC | |
| | CAAGGTGGAGAAGGGCAAGTCCAAGAAGCTGAAGTCCGTGAAGGAGCTGCTGGGCATCACCATCATGGAGCGGTCCTCCTTCGAGA | |
| | AGAACCCCATCGACTTCCTGGAGGCCAAGGGCTACAAGGAGGTGAAGAAGGACCTGATCATCAAGCTGCCCAAGTACTCCCTGTTC | |
| | GAGCTGGAGAACGGCCGGAAGCGGATGCTGGCCTCCGCCGGCGAGCTGCAGAAGGGCAACGAGCTGGCCCTGCCCTCCAAGTACGT | |
| | GAACTTCCTGTACCTGGCCTCCCACTACGAGAAGCTGAAGGGCTCCCCCGAGGACAACGAGCAGAAGCAGCTGTTCGTGGAGCAGC | |
| | ACAAGCACTACCTGGACGAGATCATCGAGCAGATCTCCGAGTTCTCCAAGCGGGTGATCCTGGCCGACGCCAACCTGGACAAGGTG | |
| | CTGTCCGCCTACAACAAGCACCGGGACAAGCCCATCCGGGAGCAGGCCGAGAACATCATCCACCTGTTCACCCTGACCAACCTGGG | |
| | CGCCCCCGCCGCCTTCAAGTACTTCGACACCACCATCGACCGGAAGCGGTACACCTCCACCAAGGAGGTGCTGGACGCCACCCTGA | |
| | TCCACCAGTCCATCACCGGCCTGTACGAGACCCGGATCGACCTGTCCCAGCTGGGCGGCGACGGCTCCGGCTCCCCCAAGAAGAAG | |
| | CGGAAGGTGGACGGCTCCCCCAAGAAGAAGCGGAAGGTGGACTCCGGCTGA | |
| Cas9 nickase | ATGGACAAGAAGTACTCCATCGGCCTGGCCATCGGCACCAACTCCGTGGGCTGGGCCGTGATCACCGACGAGTACAAGGTGCCCTC | 314 |
| ORF using | CAAGAAGTTCAAGGTGCTGGGCAACACCGACCGGCACTCCATCAAGAAGAACCTGATCGGCGCCCTGCTGTTCGACTCCGGCGAGA | |
| low A codons | CCGCCGAGGCCACCCGGCTGAAGCGGACCGCCCGGCGGCGGTACACCCGGCGGAAGAACCGGATCTGCTACCTGCAGGAGATCTTC | |
| of Table 4, | TCCAACGAGATGGCCAAGGTGGACGACTCCTTCTTCCACCGGCTGGAGGAGTCCTTCCTGGTGGAGGAGGACAAGAAGCACGAGCG | |
| with start | GCACCCCATCTTCGGCAACATCGTGGACGAGGTGGCCTACCACGAGAAGTACCCCACCATCTACCACCTGCGGAAGAAGCTGGTGG | |
| and stop | ACTCCACCGACAAGGCCGACCTGCGGCTGATCTACCTGGCCCTGGCCCACATGATCAAGTTCCGGGGCCACTTCCTGATCGAGGGC | |
| codons | GACCTGAACCCCGACAACTCCGACGTGGACAAGCTGTTCATCCAGCTGGTGCAGACCTACAACCAGCTGTTCGAGGAGAACCCCAT | |
| | CAACGCCTCCGGCGTGGACGCCAAGGCCATCCTGTCCGCCCGGCTGTCCAAGTCCCGGCGGCTGGAGAACCTGATCGCCCAGCTGC | |
| | CCGGCGAGAAGAAGAACGGCCTGTTCGGCAACCTGATCGCCCTGTCCCTGGGCCTGACCCCCAACTTCAAGTCCAACTTCGACCTG | |
| | GCCGAGGACGCCAAGCTGCAGCTGTCCAAGGACACCTACGACGACGACCTGGACAACCTGCTGGCCCAGATCGGCGACCAGTACGC | |
| | CGACCTGTTCCTGGCCGCCAAGAACCTGTCCGACGCCATCCTGCTGTCCGACATCCTGCGGGTGAACACCGAGATCACCAAGGCCC | |
| | CCCTGTCCGCCTCCATGATCAAGCGGTACGACGAGCACCACCAGGACCTGACCCTGCTGAAGGCCCTGGTGCGGCAGCAGCTGCCC | |
| | GAGAAGTACAAGGAGATCTTCTTCGACCAGTCCAAGAACGGCTACGCCGGCTACATCGACGGCGGCGCCTCCCAGGAGGAGTTCTA | |
| | CAAGTTCATCAAGCCCATCCTGGAGAAGATGGACGGCACCGAGGAGCTGCTGGTGAAGCTGAACCGGGAGGACCTGCTGCGGAAGC | |
| | AGCGGACCTTCGACAACGGCTCCATCCCCCACCAGATCCACCTGGGCGAGCTGCACGCCATCCTGCGGCGGCAGGAGGACTTCTAC | |
| | CCCTTCCTGAAGGACAACCGGGAGAAGATCGAGAAGATCCTGACCTTCCGGATCCCCTACTACGTGGGCCCCCTGGCCCGGGGCAA | |
| | CTCCCGGTTCGCCTGGATGACCCGGAAGTCCGAGGAGACCATCACCCCCTGGAACTTCGAGGAGGTGGTGGACAAGGGCGCCTCCG | |
| | CCCAGTCCTTCATCGAGCGGATGACCAACTTCGACAAGAACCTGCCCAACGAGAAGGTGCTGCCCAAGCACTCCCTGCTGTACGAG | |
| | TACTTCACCGTGTACAACGAGCTGACCAAGGTGAAGTACGTGACCGAGGGCATGCGGAAGCCCGCCTTCCTGTCCGGCGAGCAGAA | |
| | GAAGGCCATCGTGGACCTGCTGTTCAAGACCAACCGGAAGGTGACCGTGAAGCAGCTGAAGGAGGACTACTTCAAGAAGATCGAGT | |
| | GCTTCGACTCCGTGGAGATCTCCGGCGTGGAGGACCGGTTCAACGCCTCCCTGGGCACCTACCACGACCTGCTGAAGATCATCAAG | |
| | GACAAGGACTTCCTGGACAACGAGGAGAACGAGGACATCCTGGAGGACATCGTGCTGACCCTGACCCTGTTCGAGGACCGGGAGAT | |
| | GATCGAGGAGCGGCTGAAGACCTACGCCCACCTGTTCGACGACAAGGTGATGAAGCAGCTGAAGCGGCGGCGGTACACCGGCTGGG | |
| | GCCGGCTGTCCCGGAAGCTGATCAACGGCATCCGGGACAAGCAGTCCGGCAAGACCATCCTGGACTTCCTGAAGTCCGACGGCTTC | |
| | GCCAACCGGAACTTCATGCAGCTGATCCACGACGACTCCCTGACCTTCAAGGAGGACATCCAGAAGGCCCAGGTGTCCGGCCAGGG | |
| | CGACTCCCTGCACGAGCACATCGCCAACCTGGCCGGCTCCCCCGCCATCAAGAAGGGCATCCTGCAGACCGTGAAGGTGGTGGACG | |
| | AGCTGGTGAAGGTGATGGGCCGGCACAAGCCCGAGAACATCGTGATCGAGATGGCCCGGGAGAACCAGACCACCCAGAAGGGCCAG | |
| | AAGAACTCCCGGGAGCGGATGAAGCGGATCGAGGAGGGCATCAAGGAGCTGGGCTCCCAGATCCTGAAGGAGCACCCCGTGGAGAA | |
| | CACCCAGCTGCAGAACGAGAAGCTGTACCTGTACTACCTGCAGAACGGCCGGGACATGTACGTGGACCAGGAGCTGGACATCAACC | |
| | GGCTGTCCGACTACGACGTGGACCACATCGTGCCCCAGTCCTTCCTGAAGGACGACTCCATCGACAACAAGGTGCTGACCCGGTCC | |
| | GACAAGAACCGGGGCAAGTCCGACAACGTGCCCTCCGAGGAGGTGGTGAAGAAGATGAAGAACTACTGGCGGCAGCTGCTGAACGC | |
| | CAAGCTGATCACCCAGCGGAAGTTCGACAACCTGACCAAGGCCGAGCGGGGCGGCCTGTCCGAGCTGGACAAGGCCGGCTTCATCA | |
| | AGCGGCAGCTGGTGGAGACCCGGCAGATCACCAAGCACGTGGCCCAGATCCTGGACTCCCGGATGAACACCAAGTACGACGAGAAC | |
| | GACAAGCTGATCCGGGAGGTGAAGGTGATCACCCTGAAGTCCAAGCTGGTGTCCGACTTCCGGAAGGACTTCCAGTTCTACAAGGT | |
| | GCGGGAGATCAACAACTACCACCACGCCCACGACGCCTACCTGAACGCCGTGGTGGGCACCGCCCTGATCAAGAAGTACCCCAAGC | |
| | TGGAGTCCGAGTTCGTGTACGGCGACTACAAGGTGTACGACGTGCGGAAGATGATCGCCAAGTCCGAGCAGGAGATCGGCAAGGCC | |
| | ACCGCCAAGTACTTCTTCTACTCCAACATCATGAACTTCTTCAAGACCGAGATCACCCTGGCCAACGGCGAGATCCGGAAGCGGCC | |
| | CCTGATCGAGACCAACGGCGAGACCGGCGAGATCGTGTGGGACAAGGGCCGGGACTTCGCCACCGTGCGGAAGGTGCTGTCCATGC | |
| | CCCAGGTGAACATCGTGAAGAAGACCGAGGTGCAGACCGGCGGCTTCTCCAAGGAGTCCATCCTGCCCAAGCGGAACTCCGACAAG | |
| | CTGATCGCCCGGAAGAAGGACTGGGACCCCAAGAAGTACGGCGGCTTCGACTCCCCCACCGTGGCCTACTCCGTGCTGGTGGTGGC | |
| | CAAGGTGGAGAAGGGCAAGTCCAAGAAGCTGAAGTCCGTGAAGGAGCTGCTGGGCATCACCATCATGGAGCGGTCCTCCTTCGAGA | |
| | AGAACCCCATCGACTTCCTGGAGGCCAAGGGCTACAAGGAGGTGAAGAAGGACCTGATCATCAAGCTGCCCAAGTACTCCCTGTTC | |
| | GAGCTGGAGAACGGCCGGAAGCGGATGCTGGCCTCCGCCGGCGAGCTGCAGAAGGGCAACGAGCTGGCCCTGCCCTCCAAGTACGT | |
| | GAACTTCCTGTACCTGGCCTCCCACTACGAGAAGCTGAAGGGCTCCCCCGAGGACAACGAGCAGAAGCAGCTGTTCGTGGAGCAGC | |
| | ACAAGCACTACCTGGACGAGATCATCGAGCAGATCTCCGAGTTCTCCAAGCGGGTGATCCTGGCCGACGCCAACCTGGACAAGGTG | |
| | CTGTCCGCCTACAACAAGCACCGGGACAAGCCCATCCGGGAGCAGGCCGAGAACATCATCCACCTGTTCACCCTGACCAACCTGGG | |
| | CGCCCCCGCCGCCTTCAAGTACTTCGACACCACCATCGACCGGAAGCGGTACACCTCCACCAAGGAGGTGCTGGACGCCACCCTGA | |
| | TCCACCAGTCCATCACCGGCCTGTACGAGACCCGGATCGACCTGTCCCAGCTGGGCGGCGACGGCGGCGGCTCCCCCAAGAAGAAG | |
| | CGGAAGGTGTGA | |
| Cas9 nickase | ATGGACAAGAAGTACTCCATCGGCCTGGCCATCGGCACCAACTCCGTGGGCTGGGCCGTGATCACCGACGAGTACAAGGTGCCCTC | 315 |
| ORF using | CAAGAAGTTCAAGGTGCTGGGCAACACCGACCGGCACTCCATCAAGAAGAACCTGATCGGCGCCCTGCTGTTCGACTCCGGCGAGA | |
| low A codons | CCGCCGAGGCCACCCGGCTGAAGCGGACCGCCCGGCGGCGGTACACCCGGCGGAAGAACCGGATCTGCTACCTGCAGGAGATCTTC | |
| of Table 4, | TCCAACGAGATGGCCAAGGTGGACGACTCCTTCTTCCACCGGCTGGAGGAGTCCTTCCTGGTGGAGGAGGACAAGAAGCACGAGCG | |
| with start | GCACCCCATCTTCGGCAACATCGTGGACGAGGTGGCCTACCACGAGAAGTACCCCACCATCTACCACCTGCGGAAGAAGCTGGTGG | |
| and stop | ACTCCACCGACAAGGCCGACCTGCGGCTGATCTACCTGGCCCTGGCCCACATGATCAAGTTCCGGGGCCACTTCCTGATCGAGGGC | |
| codons and | GACCTGAACCCCGACAACTCCGACGTGGACAAGCTGTTCATCCAGCTGGTGCAGACCTACAACCAGCTGTTCGAGGAGAACCCCAT | |
| no NLS | CAACGCCTCCGGCGTGGACGCCAAGGCCATCCTGTCCGCCCGGCTGTCCAAGTCCCGGCGGCTGGAGAACCTGATCGCCCAGCTGC | |
| | CCGGCGAGAAGAAGAACGGCCTGTTCGGCAACCTGATCGCCCTGTCCCTGGGCCTGACCCCCAACTTCAAGTCCAACTTCGACCTG | |
| | GCCGAGGACGCCAAGCTGCAGCTGTCCAAGGACACCTACGACGACGACCTGGACAACCTGCTGGCCCAGATCGGCGACCAGTACGC | |
| | CGACCTGTTCCTGGCCGCCAAGAACCTGTCCGACGCCATCCTGCTGTCCGACATCCTGCGGGTGAACACCGAGATCACCAAGGCCC | |
| | CCCTGTCCGCCTCCATGATCAAGCGGTACGACGAGCACCACCAGGACCTGACCCTGCTGAAGGCCCTGGTGCGGCAGCAGCTGCCC | |
| | GAGAAGTACAAGGAGATCTTCTTCGACCAGTCCAAGAACGGCTACGCCGGCTACATCGACGGCGGCGCCTCCCAGGAGGAGTTCTA | |
| | CAAGTTCATCAAGCCCATCCTGGAGAAGATGGACGGCACCGAGGAGCTGCTGGTGAAGCTGAACCGGGAGGACCTGCTGCGGAAGC | |
| | AGCGGACCTTCGACAACGGCTCCATCCCCCACCAGATCCACCTGGGCGAGCTGCACGCCATCCTGCGGCGGCAGGAGGACTTCTAC | |
| | CCCTTCCTGAAGGACAACCGGGAGAAGATCGAGAAGATCCTGACCTTCCGGATCCCCTACTACGTGGGCCCCCTGGCCCGGGGCAA | |
| | CTCCCGGTTCGCCTGGATGACCCGGAAGTCCGAGGAGACCATCACCCCCTGGAACTTCGAGGAGGTGGTGGACAAGGGCGCCTCCG | |
| | CCCAGTCCTTCATCGAGCGGATGACCAACTTCGACAAGAACCTGCCCAACGAGAAGGTGCTGCCCAAGCACTCCCTGCTGTACGAG | |
| | TACTTCACCGTGTACAACGAGCTGACCAAGGTGAAGTACGTGACCGAGGGCATGCGGAAGCCCGCCTTCCTGTCCGGCGAGCAGAA | |
| | GAAGGCCATCGTGGACCTGCTGTTCAAGACCAACCGGAAGGTGACCGTGAAGCAGCTGAAGGAGGACTACTTCAAGAAGATCGAGT | |
| | GCTTCGACTCCGTGGAGATCTCCGGCGTGGAGGACCGGTTCAACGCCTCCCTGGGCACCTACCACGACCTGCTGAAGATCATCAAG | |
| | GACAAGGACTTCCTGGACAACGAGGAGAACGAGGACATCCTGGAGGACATCGTGCTGACCCTGACCCTGTTCGAGGACCGGGAGAT | |
| | GATCGAGGAGCGGCTGAAGACCTACGCCCACCTGTTCGACGACAAGGTGATGAAGCAGCTGAAGCGGCGGCGGTACACCGGCTGGG | |
| | GCCGGCTGTCCCGGAAGCTGATCAACGGCATCCGGGACAAGCAGTCCGGCAAGACCATCCTGGACTTCCTGAAGTCCGACGGCTTC | |
| | GCCAACCGGAACTTCATGCAGCTGATCCACGACGACTCCCTGACCTTCAAGGAGGACATCCAGAAGGCCCAGGTGTCCGGCCAGGG | |
| | CGACTCCCTGCACGAGCACATCGCCAACCTGGCCGGCTCCCCCGCCATCAAGAAGGGCATCCTGCAGACCGTGAAGGTGGTGGACG | |
| | AGCTGGTGAAGGTGATGGGCCGGCACAAGCCCGAGAACATCGTGATCGAGATGGCCCGGGAGAACCAGACCACCCAGAAGGGCCAG | |
| | AAGAACTCCCGGGAGCGGATGAAGCGGATCGAGGAGGGCATCAAGGAGCTGGGCTCCCAGATCCTGAAGGAGCACCCCGTGGAGAA | |
| | CACCCAGCTGCAGAACGAGAAGCTGTACCTGTACTACCTGCAGAACGGCCGGGACATGTACGTGGACCAGGAGCTGGACATCAACC | |
| | GGCTGTCCGACTACGACGTGGACCACATCGTGCCCCAGTCCTTCCTGAAGGACGACTCCATCGACAACAAGGTGCTGACCCGGTCC | |
| | GACAAGAACCGGGGCAAGTCCGACAACGTGCCCTCCGAGGAGGTGGTGAAGAAGATGAAGAACTACTGGCGGCAGCTGCTGAACGC | |
| | CAAGCTGATCACCCAGCGGAAGTTCGACAACCTGACCAAGGCCGAGCGGGGCGGCCTGTCCGAGCTGGACAAGGCCGGCTTCATCA | |
| | AGCGGCAGCTGGTGGAGACCCGGCAGATCACCAAGCACGTGGCCCAGATCCTGGACTCCCGGATGAACACCAAGTACGACGAGAAC | |
| | GACAAGCTGATCCGGGAGGTGAAGGTGATCACCCTGAAGTCCAAGCTGGTGTCCGACTTCCGGAAGGACTTCCAGTTCTACAAGGT | |
| | GCGGGAGATCAACAACTACCACCACGCCCACGACGCCTACCTGAACGCCGTGGTGGGCACCGCCCTGATCAAGAAGTACCCCAAGC | |
| | TGGAGTCCGAGTTCGTGTACGGCGACTACAAGGTGTACGACGTGCGGAAGATGATCGCCAAGTCCGAGCAGGAGATCGGCAAGGCC | |
| | ACCGCCAAGTACTTCTTCTACTCCAACATCATGAACTTCTTCAAGACCGAGATCACCCTGGCCAACGGCGAGATCCGGAAGCGGCC | |
| | CCTGATCGAGACCAACGGCGAGACCGGCGAGATCGTGTGGGACAAGGGCCGGGACTTCGCCACCGTGCGGAAGGTGCTGTCCATGC | |
| | CCCAGGTGAACATCGTGAAGAAGACCGAGGTGCAGACCGGCGGCTTCTCCAAGGAGTCCATCCTGCCCAAGCGGAACTCCGACAAG | |
| | CTGATCGCCCGGAAGAAGGACTGGGACCCCAAGAAGTACGGCGGCTTCGACTCCCCCACCGTGGCCTACTCCGTGCTGGTGGTGGC | |
| | CAAGGTGGAGAAGGGCAAGTCCAAGAAGCTGAAGTCCGTGAAGGAGCTGCTGGGCATCACCATCATGGAGCGGTCCTCCTTCGAGA | |
| | AGAACCCCATCGACTTCCTGGAGGCCAAGGGCTACAAGGAGGTGAAGAAGGACCTGATCATCAAGCTGCCCAAGTACTCCCTGTTC | |
| | GAGCTGGAGAACGGCCGGAAGCGGATGCTGGCCTCCGCCGGCGAGCTGCAGAAGGGCAACGAGCTGGCCCTGCCCTCCAAGTACGT | |
| | GAACTTCCTGTACCTGGCCTCCCACTACGAGAAGCTGAAGGGCTCCCCCGAGGACAACGAGCAGAAGCAGCTGTTCGTGGAGCAGC | |
| | ACAAGCACTACCTGGACGAGATCATCGAGCAGATCTCCGAGTTCTCCAAGCGGGTGATCCTGGCCGACGCCAACCTGGACAAGGTG | |
| | CTGTCCGCCTACAACAAGCACCGGGACAAGCCCATCCGGGAGCAGGCCGAGAACATCATCCACCTGTTCACCCTGACCAACCTGGG | |
| | CGCCCCCGCCGCCTTCAAGTACTTCGACACCACCATCGACCGGAAGCGGTACACCTCCACCAAGGAGGTGCTGGACGCCACCCTGA | |
| | TCCACCAGTCCATCACCGGCCTGTACGAGACCCGGATCGACCTGTCCCAGCTGGGCGGCGACTGA | |
| Cas9 nickase | ATGGACAAGAAGTACTCCATCGGCCTGGCCATCGGCACCAACTCCGTGGGCTGGGCCGTGATCACCGACGAGTACAAGGTGCCCTC | 316 |
| ORF using | CAAGAAGTTCAAGGTGCTGGGCAACACCGACCGGCACTCCATCAAGAAGAACCTGATCGGCGCCCTGCTGTTCGACTCCGGCGAGA | |
| low A codons | CCGCCGAGGCCACCCGGCTGAAGCGGACCGCCCGGCGGCGGTACACCCGGCGGAAGAACCGGATCTGCTACCTGCAGGAGATCTTC | |
| of Table 4, | TCCAACGAGATGGCCAAGGTGGACGACTCCTTCTTCCACCGGCTGGAGGAGTCCTTCCTGGTGGAGGAGGACAAGAAGCACGAGCG | |
| with two C- | GCACCCCATCTTCGGCAACATCGTGGACGAGGTGGCCTACCACGAGAAGTACCCCACCATCTACCACCTGCGGAAGAAGCTGGTGG | |
| terminal NLS | ACTCCACCGACAAGGCCGACCTGCGGCTGATCTACCTGGCCCTGGCCCACATGATCAAGTTCCGGGGCCACTTCCTGATCGAGGGC | |
| sequences | GACCTGAACCCCGACAACTCCGACGTGGACAAGCTGTTCATCCAGCTGGTGCAGACCTACAACCAGCTGTTCGAGGAGAACCCCAT | |
| and start | CAACGCCTCCGGCGTGGACGCCAAGGCCATCCTGTCCGCCCGGCTGTCCAAGTCCCGGCGGCTGGAGAACCTGATCGCCCAGCTGC | |
| and stop | CCGGCGAGAAGAAGAACGGCCTGTTCGGCAACCTGATCGCCCTGTCCCTGGGCCTGACCCCCAACTTCAAGTCCAACTTCGACCTG | |
| codons | GCCGAGGACGCCAAGCTGCAGCTGTCCAAGGACACCTACGACGACGACCTGGACAACCTGCTGGCCCAGATCGGCGACCAGTACGC | |
| | CGACCTGTTCCTGGCCGCCAAGAACCTGTCCGACGCCATCCTGCTGTCCGACATCCTGCGGGTGAACACCGAGATCACCAAGGCCC | |
| | CCCTGTCCGCCTCCATGATCAAGCGGTACGACGAGCACCACCAGGACCTGACCCTGCTGAAGGCCCTGGTGCGGCAGCAGCTGCCC | |
| | GAGAAGTACAAGGAGATCTTCTTCGACCAGTCCAAGAACGGCTACGCCGGCTACATCGACGGCGGCGCCTCCCAGGAGGAGTTCTA | |
| | CAAGTTCATCAAGCCCATCCTGGAGAAGATGGACGGCACCGAGGAGCTGCTGGTGAAGCTGAACCGGGAGGACCTGCTGCGGAAGC | |
| | AGCGGACCTTCGACAACGGCTCCATCCCCCACCAGATCCACCTGGGCGAGCTGCACGCCATCCTGCGGCGGCAGGAGGACTTCTAC | |
| | CCCTTCCTGAAGGACAACCGGGAGAAGATCGAGAAGATCCTGACCTTCCGGATCCCCTACTACGTGGGCCCCCTGGCCCGGGGCAA | |
| | CTCCCGGTTCGCCTGGATGACCCGGAAGTCCGAGGAGACCATCACCCCCTGGAACTTCGAGGAGGTGGTGGACAAGGGCGCCTCCG | |
| | CCCAGTCCTTCATCGAGCGGATGACCAACTTCGACAAGAACCTGCCCAACGAGAAGGTGCTGCCCAAGCACTCCCTGCTGTACGAG | |
| | TACTTCACCGTGTACAACGAGCTGACCAAGGTGAAGTACGTGACCGAGGGCATGCGGAAGCCCGCCTTCCTGTCCGGCGAGCAGAA | |
| | GAAGGCCATCGTGGACCTGCTGTTCAAGACCAACCGGAAGGTGACCGTGAAGCAGCTGAAGGAGGACTACTTCAAGAAGATCGAGT | |
| | GCTTCGACTCCGTGGAGATCTCCGGCGTGGAGGACCGGTTCAACGCCTCCCTGGGCACCTACCACGACCTGCTGAAGATCATCAAG | |
| | GACAAGGACTTCCTGGACAACGAGGAGAACGAGGACATCCTGGAGGACATCGTGCTGACCCTGACCCTGTTCGAGGACCGGGAGAT | |
| | GATCGAGGAGCGGCTGAAGACCTACGCCCACCTGTTCGACGACAAGGTGATGAAGCAGCTGAAGCGGCGGCGGTACACCGGCTGGG | |
| | GCCGGCTGTCCCGGAAGCTGATCAACGGCATCCGGGACAAGCAGTCCGGCAAGACCATCCTGGACTTCCTGAAGTCCGACGGCTTC | |
| | GCCAACCGGAACTTCATGCAGCTGATCCACGACGACTCCCTGACCTTCAAGGAGGACATCCAGAAGGCCCAGGTGTCCGGCCAGGG | |
| | CGACTCCCTGCACGAGCACATCGCCAACCTGGCCGGCTCCCCCGCCATCAAGAAGGGCATCCTGCAGACCGTGAAGGTGGTGGACG | |
| | AGCTGGTGAAGGTGATGGGCCGGCACAAGCCCGAGAACATCGTGATCGAGATGGCCCGGGAGAACCAGACCACCCAGAAGGGCCAG | |
| | AAGAACTCCCGGGAGCGGATGAAGCGGATCGAGGAGGGCATCAAGGAGCTGGGCTCCCAGATCCTGAAGGAGCACCCCGTGGAGAA | |
| | CACCCAGCTGCAGAACGAGAAGCTGTACCTGTACTACCTGCAGAACGGCCGGGACATGTACGTGGACCAGGAGCTGGACATCAACC | |
| | GGCTGTCCGACTACGACGTGGACCACATCGTGCCCCAGTCCTTCCTGAAGGACGACTCCATCGACAACAAGGTGCTGACCCGGTCC | |
| | GACAAGAACCGGGGCAAGTCCGACAACGTGCCCTCCGAGGAGGTGGTGAAGAAGATGAAGAACTACTGGCGGCAGCTGCTGAACGC | |
| | CAAGCTGATCACCCAGCGGAAGTTCGACAACCTGACCAAGGCCGAGCGGGGCGGCCTGTCCGAGCTGGACAAGGCCGGCTTCATCA | |
| | AGCGGCAGCTGGTGGAGACCCGGCAGATCACCAAGCACGTGGCCCAGATCCTGGACTCCCGGATGAACACCAAGTACGACGAGAAC | |
| | GACAAGCTGATCCGGGAGGTGAAGGTGATCACCCTGAAGTCCAAGCTGGTGTCCGACTTCCGGAAGGACTTCCAGTTCTACAAGGT | |
| | GCGGGAGATCAACAACTACCACCACGCCCACGACGCCTACCTGAACGCCGTGGTGGGCACCGCCCTGATCAAGAAGTACCCCAAGC | |
| | TGGAGTCCGAGTTCGTGTACGGCGACTACAAGGTGTACGACGTGCGGAAGATGATCGCCAAGTCCGAGCAGGAGATCGGCAAGGCC | |
| | ACCGCCAAGTACTTCTTCTACTCCAACATCATGAACTTCTTCAAGACCGAGATCACCCTGGCCAACGGCGAGATCCGGAAGCGGCC | |
| | CCTGATCGAGACCAACGGCGAGACCGGCGAGATCGTGTGGGACAAGGGCCGGGACTTCGCCACCGTGCGGAAGGTGCTGTCCATGC | |
| | CCCAGGTGAACATCGTGAAGAAGACCGAGGTGCAGACCGGCGGCTTCTCCAAGGAGTCCATCCTGCCCAAGCGGAACTCCGACAAG | |
| | CTGATCGCCCGGAAGAAGGACTGGGACCCCAAGAAGTACGGCGGCTTCGACTCCCCCACCGTGGCCTACTCCGTGCTGGTGGTGGC | |
| | CAAGGTGGAGAAGGGCAAGTCCAAGAAGCTGAAGTCCGTGAAGGAGCTGCTGGGCATCACCATCATGGAGCGGTCCTCCTTCGAGA | |
| | AGAACCCCATCGACTTCCTGGAGGCCAAGGGCTACAAGGAGGTGAAGAAGGACCTGATCATCAAGCTGCCCAAGTACTCCCTGTTC | |
| | GAGCTGGAGAACGGCCGGAAGCGGATGCTGGCCTCCGCCGGCGAGCTGCAGAAGGGCAACGAGCTGGCCCTGCCCTCCAAGTACGT | |
| | GAACTTCCTGTACCTGGCCTCCCACTACGAGAAGCTGAAGGGCTCCCCCGAGGACAACGAGCAGAAGCAGCTGTTCGTGGAGCAGC | |
| | ACAAGCACTACCTGGACGAGATCATCGAGCAGATCTCCGAGTTCTCCAAGCGGGTGATCCTGGCCGACGCCAACCTGGACAAGGTG | |
| | CTGTCCGCCTACAACAAGCACCGGGACAAGCCCATCCGGGAGCAGGCCGAGAACATCATCCACCTGTTCACCCTGACCAACCTGGG | |
| | CGCCCCCGCCGCCTTCAAGTACTTCGACACCACCATCGACCGGAAGCGGTACACCTCCACCAAGGAGGTGCTGGACGCCACCCTGA | |
| | TCCACCAGTCCATCACCGGCCTGTACGAGACCCGGATCGACCTGTCCCAGCTGGGCGGCGACGGCTCCGGCTCCCCCAAGAAGAAG | |
| | CGGAAGGTGGACGGCTCCCCCAAGAAGAAGCGGAAGGTGGACTCCGGCTGA | |
| dCas9 ORF | ATGGACAAGAAGTACTCCATCGGCCTGGCCATCGGCACCAACTCCGTGGGCTGGGCCGTGATCACCGACGAGTACAAGGTGCCCTC | 317 |
| using low A | CAAGAAGTTCAAGGTGCTGGGCAACACCGACCGGCACTCCATCAAGAAGAACCTGATCGGCGCCCTGCTGTTCGACTCCGGCGAGA | |
| codons of | CCGCCGAGGCCACCCGGCTGAAGCGGACCGCCCGGCGGCGGTACACCCGGCGGAAGAACCGGATCTGCTACCTGCAGGAGATCTTC | |
| Table 4, | TCCAACGAGATGGCCAAGGTGGACGACTCCTTCTTCCACCGGCTGGAGGAGTCCTTCCTGGTGGAGGAGGACAAGAAGCACGAGCG | |
| with start | GCACCCCATCTTCGGCAACATCGTGGACGAGGTGGCCTACCACGAGAAGTACCCCACCATCTACCACCTGCGGAAGAAGCTGGTGG | |
| and stop | ACTCCACCGACAAGGCCGACCTGCGGCTGATCTACCTGGCCCTGGCCCACATGATCAAGTTCCGGGGCCACTTCCTGATCGAGGGC | |
| codons | GACCTGAACCCCGACAACTCCGACGTGGACAAGCTGTTCATCCAGCTGGTGCAGACCTACAACCAGCTGTTCGAGGAGAACCCCAT | |
| | CAACGCCTCCGGCGTGGACGCCAAGGCCATCCTGTCCGCCCGGCTGTCCAAGTCCCGGCGGCTGGAGAACCTGATCGCCCAGCTGC | |
| | CCGGCGAGAAGAAGAACGGCCTGTTCGGCAACCTGATCGCCCTGTCCCTGGGCCTGACCCCCAACTTCAAGTCCAACTTCGACCTG | |
| | GCCGAGGACGCCAAGCTGCAGCTGTCCAAGGACACCTACGACGACGACCTGGACAACCTGCTGGCCCAGATCGGCGACCAGTACGC | |
| | CGACCTGTTCCTGGCCGCCAAGAACCTGTCCGACGCCATCCTGCTGTCCGACATCCTGCGGGTGAACACCGAGATCACCAAGGCCC | |
| | CCCTGTCCGCCTCCATGATCAAGCGGTACGACGAGCACCACCAGGACCTGACCCTGCTGAAGGCCCTGGTGCGGCAGCAGCTGCCC | |
| | GAGAAGTACAAGGAGATCTTCTTCGACCAGTCCAAGAACGGCTACGCCGGCTACATCGACGGCGGCGCCTCCCAGGAGGAGTTCTA | |
| | CAAGTTCATCAAGCCCATCCTGGAGAAGATGGACGGCACCGAGGAGCTGCTGGTGAAGCTGAACCGGGAGGACCTGCTGCGGAAGC | |
| | AGCGGACCTTCGACAACGGCTCCATCCCCCACCAGATCCACCTGGGCGAGCTGCACGCCATCCTGCGGCGGCAGGAGGACTTCTAC | |
| | CCCTTCCTGAAGGACAACCGGGAGAAGATCGAGAAGATCCTGACCTTCCGGATCCCCTACTACGTGGGCCCCCTGGCCCGGGGCAA | |
| | CTCCCGGTTCGCCTGGATGACCCGGAAGTCCGAGGAGACCATCACCCCCTGGAACTTCGAGGAGGTGGTGGACAAGGGCGCCTCCG | |
| | CCCAGTCCTTCATCGAGCGGATGACCAACTTCGACAAGAACCTGCCCAACGAGAAGGTGCTGCCCAAGCACTCCCTGCTGTACGAG | |
| | TACTTCACCGTGTACAACGAGCTGACCAAGGTGAAGTACGTGACCGAGGGCATGCGGAAGCCCGCCTTCCTGTCCGGCGAGCAGAA | |
| | GAAGGCCATCGTGGACCTGCTGTTCAAGACCAACCGGAAGGTGACCGTGAAGCAGCTGAAGGAGGACTACTTCAAGAAGATCGAGT | |
| | GCTTCGACTCCGTGGAGATCTCCGGCGTGGAGGACCGGTTCAACGCCTCCCTGGGCACCTACCACGACCTGCTGAAGATCATCAAG | |
| | GACAAGGACTTCCTGGACAACGAGGAGAACGAGGACATCCTGGAGGACATCGTGCTGACCCTGACCCTGTTCGAGGACCGGGAGAT | |
| | GATCGAGGAGCGGCTGAAGACCTACGCCCACCTGTTCGACGACAAGGTGATGAAGCAGCTGAAGCGGCGGCGGTACACCGGCTGGG | |
| | GCCGGCTGTCCCGGAAGCTGATCAACGGCATCCGGGACAAGCAGTCCGGCAAGACCATCCTGGACTTCCTGAAGTCCGACGGCTTC | |
| | GCCAACCGGAACTTCATGCAGCTGATCCACGACGACTCCCTGACCTTCAAGGAGGACATCCAGAAGGCCCAGGTGTCCGGCCAGGG | |
| | CGACTCCCTGCACGAGCACATCGCCAACCTGGCCGGCTCCCCCGCCATCAAGAAGGGCATCCTGCAGACCGTGAAGGTGGTGGACG | |
| | AGCTGGTGAAGGTGATGGGCCGGCACAAGCCCGAGAACATCGTGATCGAGATGGCCCGGGAGAACCAGACCACCCAGAAGGGCCAG | |
| | AAGAACTCCCGGGAGCGGATGAAGCGGATCGAGGAGGGCATCAAGGAGCTGGGCTCCCAGATCCTGAAGGAGCACCCCGTGGAGAA | |
| | CACCCAGCTGCAGAACGAGAAGCTGTACCTGTACTACCTGCAGAACGGCCGGGACATGTACGTGGACCAGGAGCTGGACATCAACC | |
| | GGCTGTCCGACTACGACGTGGACGCCATCGTGCCCCAGTCCTTCCTGAAGGACGACTCCATCGACAACAAGGTGCTGACCCGGTCC | |
| | GACAAGAACCGGGGCAAGTCCGACAACGTGCCCTCCGAGGAGGTGGTGAAGAAGATGAAGAACTACTGGCGGCAGCTGCTGAACGC | |
| | CAAGCTGATCACCCAGCGGAAGTTCGACAACCTGACCAAGGCCGAGCGGGGCGGCCTGTCCGAGCTGGACAAGGCCGGCTTCATCA | |
| | AGCGGCAGCTGGTGGAGACCCGGCAGATCACCAAGCACGTGGCCCAGATCCTGGACTCCCGGATGAACACCAAGTACGACGAGAAC | |
| | GACAAGCTGATCCGGGAGGTGAAGGTGATCACCCTGAAGTCCAAGCTGGTGTCCGACTTCCGGAAGGACTTCCAGTTCTACAAGGT | |
| | GCGGGAGATCAACAACTACCACCACGCCCACGACGCCTACCTGAACGCCGTGGTGGGCACCGCCCTGATCAAGAAGTACCCCAAGC | |
| | TGGAGTCCGAGTTCGTGTACGGCGACTACAAGGTGTACGACGTGCGGAAGATGATCGCCAAGTCCGAGCAGGAGATCGGCAAGGCC | |
| | ACCGCCAAGTACTTCTTCTACTCCAACATCATGAACTTCTTCAAGACCGAGATCACCCTGGCCAACGGCGAGATCCGGAAGCGGCC | |
| | CCTGATCGAGACCAACGGCGAGACCGGCGAGATCGTGTGGGACAAGGGCCGGGACTTCGCCACCGTGCGGAAGGTGCTGTCCATGC | |
| | CCCAGGTGAACATCGTGAAGAAGACCGAGGTGCAGACCGGCGGCTTCTCCAAGGAGTCCATCCTGCCCAAGCGGAACTCCGACAAG | |
| | CTGATCGCCCGGAAGAAGGACTGGGACCCCAAGAAGTACGGCGGCTTCGACTCCCCCACCGTGGCCTACTCCGTGCTGGTGGTGGC | |
| | CAAGGTGGAGAAGGGCAAGTCCAAGAAGCTGAAGTCCGTGAAGGAGCTGCTGGGCATCACCATCATGGAGCGGTCCTCCTTCGAGA | |
| | AGAACCCCATCGACTTCCTGGAGGCCAAGGGCTACAAGGAGGTGAAGAAGGACCTGATCATCAAGCTGCCCAAGTACTCCCTGTTC | |
| | GAGCTGGAGAACGGCCGGAAGCGGATGCTGGCCTCCGCCGGCGAGCTGCAGAAGGGCAACGAGCTGGCCCTGCCCTCCAAGTACGT | |
| | GAACTTCCTGTACCTGGCCTCCCACTACGAGAAGCTGAAGGGCTCCCCCGAGGACAACGAGCAGAAGCAGCTGTTCGTGGAGCAGC | |
| | ACAAGCACTACCTGGACGAGATCATCGAGCAGATCTCCGAGTTCTCCAAGCGGGTGATCCTGGCCGACGCCAACCTGGACAAGGTG | |
| | CTGTCCGCCTACAACAAGCACCGGGACAAGCCCATCCGGGAGCAGGCCGAGAACATCATCCACCTGTTCACCCTGACCAACCTGGG | |
| | CGCCCCCGCCGCCTTCAAGTACTTCGACACCACCATCGACCGGAAGCGGTACACCTCCACCAAGGAGGTGCTGGACGCCACCCTGA | |
| | TCCACCAGTCCATCACCGGCCTGTACGAGACCCGGATCGACCTGTCCCAGCTGGGCGGCGACGGCGGCGGCTCCCCCAAGAAGAAG | |
| | CGGAAGGTGTGA | |
| dCas9 ORF | ATGGACAAGAAGTACTCCATCGGCCTGGCCATCGGCACCAACTCCGTGGGCTGGGCCGTGATCACCGACGAGTACAAGGTGCCCTC | 318 |
| using low A | CAAGAAGTTCAAGGTGCTGGGCAACACCGACCGGCACTCCATCAAGAAGAACCTGATCGGCGCCCTGCTGTTCGACTCCGGCGAGA | |
| codons of | CCGCCGAGGCCACCCGGCTGAAGCGGACCGCCCGGCGGCGGTACACCCGGCGGAAGAACCGGATCTGCTACCTGCAGGAGATCTTC | |
| Table 4, | TCCAACGAGATGGCCAAGGTGGACGACTCCTTCTTCCACCGGCTGGAGGAGTCCTTCCTGGTGGAGGAGGACAAGAAGCACGAGCG | |
| with start | GCACCCCATCTTCGGCAACATCGTGGACGAGGTGGCCTACCACGAGAAGTACCCCACCATCTACCACCTGCGGAAGAAGCTGGTGG | |
| and stop | ACTCCACCGACAAGGCCGACCTGCGGCTGATCTACCTGGCCCTGGCCCACATGATCAAGTTCCGGGGCCACTTCCTGATCGAGGGC | |
| codons and | GACCTGAACCCCGACAACTCCGACGTGGACAAGCTGTTCATCCAGCTGGTGCAGACCTACAACCAGCTGTTCGAGGAGAACCCCAT | |
| no NLS | CAACGCCTCCGGCGTGGACGCCAAGGCCATCCTGTCCGCCCGGCTGTCCAAGTCCCGGCGGCTGGAGAACCTGATCGCCCAGCTGC | |
| | CCGGCGAGAAGAAGAACGGCCTGTTCGGCAACCTGATCGCCCTGTCCCTGGGCCTGACCCCCAACTTCAAGTCCAACTTCGACCTG | |
| | GCCGAGGACGCCAAGCTGCAGCTGTCCAAGGACACCTACGACGACGACCTGGACAACCTGCTGGCCCAGATCGGCGACCAGTACGC | |
| | CGACCTGTTCCTGGCCGCCAAGAACCTGTCCGACGCCATCCTGCTGTCCGACATCCTGCGGGTGAACACCGAGATCACCAAGGCCC | |
| | CCCTGTCCGCCTCCATGATCAAGCGGTACGACGAGCACCACCAGGACCTGACCCTGCTGAAGGCCCTGGTGCGGCAGCAGCTGCCC | |
| | GAGAAGTACAAGGAGATCTTCTTCGACCAGTCCAAGAACGGCTACGCCGGCTACATCGACGGCGGCGCCTCCCAGGAGGAGTTCTA | |
| | CAAGTTCATCAAGCCCATCCTGGAGAAGATGGACGGCACCGAGGAGCTGCTGGTGAAGCTGAACCGGGAGGACCTGCTGCGGAAGC | |
| | AGCGGACCTTCGACAACGGCTCCATCCCCCACCAGATCCACCTGGGCGAGCTGCACGCCATCCTGCGGCGGCAGGAGGACTTCTAC | |
| | CCCTTCCTGAAGGACAACCGGGAGAAGATCGAGAAGATCCTGACCTTCCGGATCCCCTACTACGTGGGCCCCCTGGCCCGGGGCAA | |
| | CTCCCGGTTCGCCTGGATGACCCGGAAGTCCGAGGAGACCATCACCCCCTGGAACTTCGAGGAGGTGGTGGACAAGGGCGCCTCCG | |
| | CCCAGTCCTTCATCGAGCGGATGACCAACTTCGACAAGAACCTGCCCAACGAGAAGGTGCTGCCCAAGCACTCCCTGCTGTACGAG | |
| | TACTTCACCGTGTACAACGAGCTGACCAAGGTGAAGTACGTGACCGAGGGCATGCGGAAGCCCGCCTTCCTGTCCGGCGAGCAGAA | |
| | GAAGGCCATCGTGGACCTGCTGTTCAAGACCAACCGGAAGGTGACCGTGAAGCAGCTGAAGGAGGACTACTTCAAGAAGATCGAGT | |
| | GCTTCGACTCCGTGGAGATCTCCGGCGTGGAGGACCGGTTCAACGCCTCCCTGGGCACCTACCACGACCTGCTGAAGATCATCAAG | |
| | GACAAGGACTTCCTGGACAACGAGGAGAACGAGGACATCCTGGAGGACATCGTGCTGACCCTGACCCTGTTCGAGGACCGGGAGAT | |
| | GATCGAGGAGCGGCTGAAGACCTACGCCCACCTGTTCGACGACAAGGTGATGAAGCAGCTGAAGCGGCGGCGGTACACCGGCTGGG | |
| | GCCGGCTGTCCCGGAAGCTGATCAACGGCATCCGGGACAAGCAGTCCGGCAAGACCATCCTGGACTTCCTGAAGTCCGACGGCTTC | |
| | GCCAACCGGAACTTCATGCAGCTGATCCACGACGACTCCCTGACCTTCAAGGAGGACATCCAGAAGGCCCAGGTGTCCGGCCAGGG | |
| | CGACTCCCTGCACGAGCACATCGCCAACCTGGCCGGCTCCCCCGCCATCAAGAAGGGCATCCTGCAGACCGTGAAGGTGGTGGACG | |
| | AGCTGGTGAAGGTGATGGGCCGGCACAAGCCCGAGAACATCGTGATCGAGATGGCCCGGGAGAACCAGACCACCCAGAAGGGCCAG | |
| | AAGAACTCCCGGGAGCGGATGAAGCGGATCGAGGAGGGCATCAAGGAGCTGGGCTCCCAGATCCTGAAGGAGCACCCCGTGGAGAA | |
| | CACCCAGCTGCAGAACGAGAAGCTGTACCTGTACTACCTGCAGAACGGCCGGGACATGTACGTGGACCAGGAGCTGGACATCAACC | |
| | GGCTGTCCGACTACGACGTGGACGCCATCGTGCCCCAGTCCTTCCTGAAGGACGACTCCATCGACAACAAGGTGCTGACCCGGTCC | |
| | GACAAGAACCGGGGCAAGTCCGACAACGTGCCCTCCGAGGAGGTGGTGAAGAAGATGAAGAACTACTGGCGGCAGCTGCTGAACGC | |
| | CAAGCTGATCACCCAGCGGAAGTTCGACAACCTGACCAAGGCCGAGCGGGGCGGCCTGTCCGAGCTGGACAAGGCCGGCTTCATCA | |
| | AGCGGCAGCTGGTGGAGACCCGGCAGATCACCAAGCACGTGGCCCAGATCCTGGACTCCCGGATGAACACCAAGTACGACGAGAAC | |
| | GACAAGCTGATCCGGGAGGTGAAGGTGATCACCCTGAAGTCCAAGCTGGTGTCCGACTTCCGGAAGGACTTCCAGTTCTACAAGGT | |
| | GCGGGAGATCAACAACTACCACCACGCCCACGACGCCTACCTGAACGCCGTGGTGGGCACCGCCCTGATCAAGAAGTACCCCAAGC | |
| | TGGAGTCCGAGTTCGTGTACGGCGACTACAAGGTGTACGACGTGCGGAAGATGATCGCCAAGTCCGAGCAGGAGATCGGCAAGGCC | |
| | ACCGCCAAGTACTTCTTCTACTCCAACATCATGAACTTCTTCAAGACCGAGATCACCCTGGCCAACGGCGAGATCCGGAAGCGGCC | |
| | CCTGATCGAGACCAACGGCGAGACCGGCGAGATCGTGTGGGACAAGGGCCGGGACTTCGCCACCGTGCGGAAGGTGCTGTCCATGC | |
| | CCCAGGTGAACATCGTGAAGAAGACCGAGGTGCAGACCGGCGGCTTCTCCAAGGAGTCCATCCTGCCCAAGCGGAACTCCGACAAG | |
| | CTGATCGCCCGGAAGAAGGACTGGGACCCCAAGAAGTACGGCGGCTTCGACTCCCCCACCGTGGCCTACTCCGTGCTGGTGGTGGC | |
| | CAAGGTGGAGAAGGGCAAGTCCAAGAAGCTGAAGTCCGTGAAGGAGCTGCTGGGCATCACCATCATGGAGCGGTCCTCCTTCGAGA | |
| | AGAACCCCATCGACTTCCTGGAGGCCAAGGGCTACAAGGAGGTGAAGAAGGACCTGATCATCAAGCTGCCCAAGTACTCCCTGTTC | |
| | GAGCTGGAGAACGGCCGGAAGCGGATGCTGGCCTCCGCCGGCGAGCTGCAGAAGGGCAACGAGCTGGCCCTGCCCTCCAAGTACGT | |
| | GAACTTCCTGTACCTGGCCTCCCACTACGAGAAGCTGAAGGGCTCCCCCGAGGACAACGAGCAGAAGCAGCTGTTCGTGGAGCAGC | |
| | ACAAGCACTACCTGGACGAGATCATCGAGCAGATCTCCGAGTTCTCCAAGCGGGTGATCCTGGCCGACGCCAACCTGGACAAGGTG | |
| | CTGTCCGCCTACAACAAGCACCGGGACAAGCCCATCCGGGAGCAGGCCGAGAACATCATCCACCTGTTCACCCTGACCAACCTGGG | |
| | CGCCCCCGCCGCCTTCAAGTACTTCGACACCACCATCGACCGGAAGCGGTACACCTCCACCAAGGAGGTGCTGGACGCCACCCTGA | |
| | TCCACCAGTCCATCACCGGCCTGTACGAGACCCGGATCGACCTGTCCCAGCTGGGCGGCGACTGA | |
| dCas9 ORF | ATGGACAAGAAGTACTCCATCGGCCTGGCCATCGGCACCAACTCCGTGGGCTGGGCCGTGATCACCGACGAGTACAAGGTGCCCTC | 319 |
| using low A | CAAGAAGTTCAAGGTGCTGGGCAACACCGACCGGCACTCCATCAAGAAGAACCTGATCGGCGCCCTGCTGTTCGACTCCGGCGAGA | |
| codons of | CCGCCGAGGCCACCCGGCTGAAGCGGACCGCCCGGCGGCGGTACACCCGGCGGAAGAACCGGATCTGCTACCTGCAGGAGATCTTC | |
| Table 4, | TCCAACGAGATGGCCAAGGTGGACGACTCCTTCTTCCACCGGCTGGAGGAGTCCTTCCTGGTGGAGGAGGACAAGAAGCACGAGCG | |
| with two C- | GCACCCCATCTTCGGCAACATCGTGGACGAGGTGGCCTACCACGAGAAGTACCCCACCATCTACCACCTGCGGAAGAAGCTGGTGG | |
| terminal NLS | ACTCCACCGACAAGGCCGACCTGCGGCTGATCTACCTGGCCCTGGCCCACATGATCAAGTTCCGGGGCCACTTCCTGATCGAGGGC | |
| sequences | GACCTGAACCCCGACAACTCCGACGTGGACAAGCTGTTCATCCAGCTGGTGCAGACCTACAACCAGCTGTTCGAGGAGAACCCCAT | |
| and start | CAACGCCTCCGGCGTGGACGCCAAGGCCATCCTGTCCGCCCGGCTGTCCAAGTCCCGGCGGCTGGAGAACCTGATCGCCCAGCTGC | |
| and stop | CCGGCGAGAAGAAGAACGGCCTGTTCGGCAACCTGATCGCCCTGTCCCTGGGCCTGACCCCCAACTTCAAGTCCAACTTCGACCTG | |
| codons | GCCGAGGACGCCAAGCTGCAGCTGTCCAAGGACACCTACGACGACGACCTGGACAACCTGCTGGCCCAGATCGGCGACCAGTACGC | |
| | CGACCTGTTCCTGGCCGCCAAGAACCTGTCCGACGCCATCCTGCTGTCCGACATCCTGCGGGTGAACACCGAGATCACCAAGGCCC | |
| | CCCTGTCCGCCTCCATGATCAAGCGGTACGACGAGCACCACCAGGACCTGACCCTGCTGAAGGCCCTGGTGCGGCAGCAGCTGCCC | |
| | GAGAAGTACAAGGAGATCTTCTTCGACCAGTCCAAGAACGGCTACGCCGGCTACATCGACGGCGGCGCCTCCCAGGAGGAGTTCTA | |
| | CAAGTTCATCAAGCCCATCCTGGAGAAGATGGACGGCACCGAGGAGCTGCTGGTGAAGCTGAACCGGGAGGACCTGCTGCGGAAGC | |
| | AGCGGACCTTCGACAACGGCTCCATCCCCCACCAGATCCACCTGGGCGAGCTGCACGCCATCCTGCGGCGGCAGGAGGACTTCTAC | |
| | CCCTTCCTGAAGGACAACCGGGAGAAGATCGAGAAGATCCTGACCTTCCGGATCCCCTACTACGTGGGCCCCCTGGCCCGGGGCAA | |
| | CTCCCGGTTCGCCTGGATGACCCGGAAGTCCGAGGAGACCATCACCCCCTGGAACTTCGAGGAGGTGGTGGACAAGGGCGCCTCCG | |
| | CCCAGTCCTTCATCGAGCGGATGACCAACTTCGACAAGAACCTGCCCAACGAGAAGGTGCTGCCCAAGCACTCCCTGCTGTACGAG | |
| | TACTTCACCGTGTACAACGAGCTGACCAAGGTGAAGTACGTGACCGAGGGCATGCGGAAGCCCGCCTTCCTGTCCGGCGAGCAGAA | |
| | GAAGGCCATCGTGGACCTGCTGTTCAAGACCAACCGGAAGGTGACCGTGAAGCAGCTGAAGGAGGACTACTTCAAGAAGATCGAGT | |
| | GCTTCGACTCCGTGGAGATCTCCGGCGTGGAGGACCGGTTCAACGCCTCCCTGGGCACCTACCACGACCTGCTGAAGATCATCAAG | |
| | GACAAGGACTTCCTGGACAACGAGGAGAACGAGGACATCCTGGAGGACATCGTGCTGACCCTGACCCTGTTCGAGGACCGGGAGAT | |
| | GATCGAGGAGCGGCTGAAGACCTACGCCCACCTGTTCGACGACAAGGTGATGAAGCAGCTGAAGCGGCGGCGGTACACCGGCTGGG | |
| | GCCGGCTGTCCCGGAAGCTGATCAACGGCATCCGGGACAAGCAGTCCGGCAAGACCATCCTGGACTTCCTGAAGTCCGACGGCTTC | |
| | GCCAACCGGAACTTCATGCAGCTGATCCACGACGACTCCCTGACCTTCAAGGAGGACATCCAGAAGGCCCAGGTGTCCGGCCAGGG | |
| | CGACTCCCTGCACGAGCACATCGCCAACCTGGCCGGCTCCCCCGCCATCAAGAAGGGCATCCTGCAGACCGTGAAGGTGGTGGACG | |
| | AGCTGGTGAAGGTGATGGGCCGGCACAAGCCCGAGAACATCGTGATCGAGATGGCCCGGGAGAACCAGACCACCCAGAAGGGCCAG | |
| | AAGAACTCCCGGGAGCGGATGAAGCGGATCGAGGAGGGCATCAAGGAGCTGGGCTCCCAGATCCTGAAGGAGCACCCCGTGGAGAA | |
| | CACCCAGCTGCAGAACGAGAAGCTGTACCTGTACTACCTGCAGAACGGCCGGGACATGTACGTGGACCAGGAGCTGGACATCAACC | |
| | GGCTGTCCGACTACGACGTGGACGCCATCGTGCCCCAGTCCTTCCTGAAGGACGACTCCATCGACAACAAGGTGCTGACCCGGTCC | |
| | GACAAGAACCGGGGCAAGTCCGACAACGTGCCCTCCGAGGAGGTGGTGAAGAAGATGAAGAACTACTGGCGGCAGCTGCTGAACGC | |
| | CAAGCTGATCACCCAGCGGAAGTTCGACAACCTGACCAAGGCCGAGCGGGGCGGCCTGTCCGAGCTGGACAAGGCCGGCTTCATCA | |
| | AGCGGCAGCTGGTGGAGACCCGGCAGATCACCAAGCACGTGGCCCAGATCCTGGACTCCCGGATGAACACCAAGTACGACGAGAAC | |
| | GACAAGCTGATCCGGGAGGTGAAGGTGATCACCCTGAAGTCCAAGCTGGTGTCCGACTTCCGGAAGGACTTCCAGTTCTACAAGGT | |
| | GCGGGAGATCAACAACTACCACCACGCCCACGACGCCTACCTGAACGCCGTGGTGGGCACCGCCCTGATCAAGAAGTACCCCAAGC | |
| | TGGAGTCCGAGTTCGTGTACGGCGACTACAAGGTGTACGACGTGCGGAAGATGATCGCCAAGTCCGAGCAGGAGATCGGCAAGGCC | |
| | ACCGCCAAGTACTTCTTCTACTCCAACATCATGAACTTCTTCAAGACCGAGATCACCCTGGCCAACGGCGAGATCCGGAAGCGGCC | |
| | CCTGATCGAGACCAACGGCGAGACCGGCGAGATCGTGTGGGACAAGGGCCGGGACTTCGCCACCGTGCGGAAGGTGCTGTCCATGC | |
| | CCCAGGTGAACATCGTGAAGAAGACCGAGGTGCAGACCGGCGGCTTCTCCAAGGAGTCCATCCTGCCCAAGCGGAACTCCGACAAG | |
| | CTGATCGCCCGGAAGAAGGACTGGGACCCCAAGAAGTACGGCGGCTTCGACTCCCCCACCGTGGCCTACTCCGTGCTGGTGGTGGC | |
| | CAAGGTGGAGAAGGGCAAGTCCAAGAAGCTGAAGTCCGTGAAGGAGCTGCTGGGCATCACCATCATGGAGCGGTCCTCCTTCGAGA | |
| | AGAACCCCATCGACTTCCTGGAGGCCAAGGGCTACAAGGAGGTGAAGAAGGACCTGATCATCAAGCTGCCCAAGTACTCCCTGTTC | |
| | GAGCTGGAGAACGGCCGGAAGCGGATGCTGGCCTCCGCCGGCGAGCTGCAGAAGGGCAACGAGCTGGCCCTGCCCTCCAAGTACGT | |
| | GAACTTCCTGTACCTGGCCTCCCACTACGAGAAGCTGAAGGGCTCCCCCGAGGACAACGAGCAGAAGCAGCTGTTCGTGGAGCAGC | |
| | ACAAGCACTACCTGGACGAGATCATCGAGCAGATCTCCGAGTTCTCCAAGCGGGTGATCCTGGCCGACGCCAACCTGGACAAGGTG | |
| | CTGTCCGCCTACAACAAGCACCGGGACAAGCCCATCCGGGAGCAGGCCGAGAACATCATCCACCTGTTCACCCTGACCAACCTGGG | |
| | CGCCCCCGCCGCCTTCAAGTACTTCGACACCACCATCGACCGGAAGCGGTACACCTCCACCAAGGAGGTGCTGGACGCCACCCTGA | |
| | TCCACCAGTCCATCACCGGCCTGTACGAGACCCGGATCGACCTGTCCCAGCTGGGCGGCGACGGCTCCGGCTCCCCCAAGAAGAAG | |
| | CGGAAGGTGGACGGCTCCCCCAAGAAGAAGCGGAAGGTGGACTCCGGCTGA | |
| Cas9 ORF | ATGGACAAGAAGTACAGCATCGGCCTGGACATCGGCACCAACAGCGTGGGCTGGGCCGTGATCACCGACGAGTACAAGGTGCCCAG | 320 |
| using low | CAAGAAGTTCAAGGTGCTGGGCAACACCGACCGGCACAGCATCAAGAAGAACCTGATCGGCGCCCTGCTGTTCGACAGCGGCGAGA | |
| A/U codons | CCGCCGAGGCCACCCGGCTGAAGCGGACCGCCCGGCGGCGGTACACCCGGCGGAAGAACCGGATCTGCTACCTGCAGGAGATCTTC | |
| of Table 4, | AGCAACGAGATGGCCAAGGTGGACGACAGCTTCTTCCACCGGCTGGAGGAGAGCTTCCTGGTGGAGGAGGACAAGAAGCACGAGCG | |
| with two C- | GCACCCCATCTTCGGCAACATCGTGGACGAGGTGGCCTACCACGAGAAGTACCCCACCATCTACCACCTGCGGAAGAAGCTGGTGG | |
| terminal NLS | ACAGCACCGACAAGGCCGACCTGCGGCTGATCTACCTGGCCCTGGCCCACATGATCAAGTTCCGGGGCCACTTCCTGATCGAGGGC | |
| sequences | GACCTGAACCCCGACAACAGCGACGTGGACAAGCTGTTCATCCAGCTGGTGCAGACCTACAACCAGCTGTTCGAGGAGAACCCCAT | |
| and start | CAACGCCAGCGGCGTGGACGCCAAGGCCATCCTGAGCGCCCGGCTGAGCAAGAGCCGGCGGCTGGAGAACCTGATCGCCCAGCTGC | |
| and stop | CCGGCGAGAAGAAGAACGGCCTGTTCGGCAACCTGATCGCCCTGAGCCTGGGCCTGACCCCCAACTTCAAGAGCAACTTCGACCTG | |
| codons | GCCGAGGACGCCAAGCTGCAGCTGAGCAAGGACACCTACGACGACGACCTGGACAACCTGCTGGCCCAGATCGGCGACCAGTACGC | |
| | CGACCTGTTCCTGGCCGCCAAGAACCTGAGCGACGCCATCCTGCTGAGCGACATCCTGCGGGTGAACACCGAGATCACCAAGGCCC | |
| | CCCTGAGCGCCAGCATGATCAAGCGGTACGACGAGCACCACCAGGACCTGACCCTGCTGAAGGCCCTGGTGCGGCAGCAGCTGCCC | |
| | GAGAAGTACAAGGAGATCTTCTTCGACCAGAGCAAGAACGGCTACGCCGGCTACATCGACGGCGGCGCCAGCCAGGAGGAGTTCTA | |
| | CAAGTTCATCAAGCCCATCCTGGAGAAGATGGACGGCACCGAGGAGCTGCTGGTGAAGCTGAACCGGGAGGACCTGCTGCGGAAGC | |
| | AGCGGACCTTCGACAACGGCAGCATCCCCCACCAGATCCACCTGGGCGAGCTGCACGCCATCCTGCGGCGGCAGGAGGACTTCTAC | |
| | CCCTTCCTGAAGGACAACCGGGAGAAGATCGAGAAGATCCTGACCTTCCGGATCCCCTACTACGTGGGCCCCCTGGCCCGGGGCAA | |
| | CAGCCGGTTCGCCTGGATGACCCGGAAGAGCGAGGAGACCATCACCCCCTGGAACTTCGAGGAGGTGGTGGACAAGGGCGCCAGCG | |
| | CCCAGAGCTTCATCGAGCGGATGACCAACTTCGACAAGAACCTGCCCAACGAGAAGGTGCTGCCCAAGCACAGCCTGCTGTACGAG | |
| | TACTTCACCGTGTACAACGAGCTGACCAAGGTGAAGTACGTGACCGAGGGCATGCGGAAGCCCGCCTTCCTGAGCGGCGAGCAGAA | |
| | GAAGGCCATCGTGGACCTGCTGTTCAAGACCAACCGGAAGGTGACCGTGAAGCAGCTGAAGGAGGACTACTTCAAGAAGATCGAGT | |
| | GCTTCGACAGCGTGGAGATCAGCGGCGTGGAGGACCGGTTCAACGCCAGCCTGGGCACCTACCACGACCTGCTGAAGATCATCAAG | |
| | GACAAGGACTTCCTGGACAACGAGGAGAACGAGGACATCCTGGAGGACATCGTGCTGACCCTGACCCTGTTCGAGGACCGGGAGAT | |
| | GATCGAGGAGCGGCTGAAGACCTACGCCCACCTGTTCGACGACAAGGTGATGAAGCAGCTGAAGCGGCGGCGGTACACCGGCTGGG | |
| | GCCGGCTGAGCCGGAAGCTGATCAACGGCATCCGGGACAAGCAGAGCGGCAAGACCATCCTGGACTTCCTGAAGAGCGACGGCTTC | |
| | GCCAACCGGAACTTCATGCAGCTGATCCACGACGACAGCCTGACCTTCAAGGAGGACATCCAGAAGGCCCAGGTGAGCGGCCAGGG | |
| | CGACAGCCTGCACGAGCACATCGCCAACCTGGCCGGCAGCCCCGCCATCAAGAAGGGCATCCTGCAGACCGTGAAGGTGGTGGACG | |
| | AGCTGGTGAAGGTGATGGGCCGGCACAAGCCCGAGAACATCGTGATCGAGATGGCCCGGGAGAACCAGACCACCCAGAAGGGCCAG | |
| | AAGAACAGCCGGGAGCGGATGAAGCGGATCGAGGAGGGCATCAAGGAGCTGGGCAGCCAGATCCTGAAGGAGCACCCCGTGGAGAA | |
| | CACCCAGCTGCAGAACGAGAAGCTGTACCTGTACTACCTGCAGAACGGCCGGGACATGTACGTGGACCAGGAGCTGGACATCAACC | |
| | GGCTGAGCGACTACGACGTGGACCACATCGTGCCCCAGAGCTTCCTGAAGGACGACAGCATCGACAACAAGGTGCTGACCCGGAGC | |
| | GACAAGAACCGGGGCAAGAGCGACAACGTGCCCAGCGAGGAGGTGGTGAAGAAGATGAAGAACTACTGGCGGCAGCTGCTGAACGC | |
| | CAAGCTGATCACCCAGCGGAAGTTCGACAACCTGACCAAGGCCGAGCGGGGCGGCCTGAGCGAGCTGGACAAGGCCGGCTTCATCA | |
| | AGCGGCAGCTGGTGGAGACCCGGCAGATCACCAAGCACGTGGCCCAGATCCTGGACAGCCGGATGAACACCAAGTACGACGAGAAC | |
| | GACAAGCTGATCCGGGAGGTGAAGGTGATCACCCTGAAGAGCAAGCTGGTGAGCGACTTCCGGAAGGACTTCCAGTTCTACAAGGT | |
| | GCGGGAGATCAACAACTACCACCACGCCCACGACGCCTACCTGAACGCCGTGGTGGGCACCGCCCTGATCAAGAAGTACCCCAAGC | |
| | TGGAGAGCGAGTTCGTGTACGGCGACTACAAGGTGTACGACGTGCGGAAGATGATCGCCAAGAGCGAGCAGGAGATCGGCAAGGCC | |
| | ACCGCCAAGTACTTCTTCTACAGCAACATCATGAACTTCTTCAAGACCGAGATCACCCTGGCCAACGGCGAGATCCGGAAGCGGCC | |
| | CCTGATCGAGACCAACGGCGAGACCGGCGAGATCGTGTGGGACAAGGGCCGGGACTTCGCCACCGTGCGGAAGGTGCTGAGCATGC | |
| | CCCAGGTGAACATCGTGAAGAAGACCGAGGTGCAGACCGGCGGCTTCAGCAAGGAGAGCATCCTGCCCAAGCGGAACAGCGACAAG | |
| | CTGATCGCCCGGAAGAAGGACTGGGACCCCAAGAAGTACGGCGGCTTCGACAGCCCCACCGTGGCCTACAGCGTGCTGGTGGTGGC | |
| | CAAGGTGGAGAAGGGCAAGAGCAAGAAGCTGAAGAGCGTGAAGGAGCTGCTGGGCATCACCATCATGGAGCGGAGCAGCTTCGAGA | |
| | AGAACCCCATCGACTTCCTGGAGGCCAAGGGCTACAAGGAGGTGAAGAAGGACCTGATCATCAAGCTGCCCAAGTACAGCCTGTTC | |
| | GAGCTGGAGAACGGCCGGAAGCGGATGCTGGCCAGCGCCGGCGAGCTGCAGAAGGGCAACGAGCTGGCCCTGCCCAGCAAGTACGT | |
| | GAACTTCCTGTACCTGGCCAGCCACTACGAGAAGCTGAAGGGCAGCCCCGAGGACAACGAGCAGAAGCAGCTGTTCGTGGAGCAGC | |
| | ACAAGCACTACCTGGACGAGATCATCGAGCAGATCAGCGAGTTCAGCAAGCGGGTGATCCTGGCCGACGCCAACCTGGACAAGGTG | |
| | CTGAGCGCCTACAACAAGCACCGGGACAAGCCCATCCGGGAGCAGGCCGAGAACATCATCCACCTGTTCACCCTGACCAACCTGGG | |
| | CGCCCCCGCCGCCTTCAAGTACTTCGACACCACCATCGACCGGAAGCGGTACACCAGCACCAAGGAGGTGCTGGACGCCACCCTGA | |
| | TCCACCAGAGCATCACCGGCCTGTACGAGACCCGGATCGACCTGAGCCAGCTGGGCGGCGACGGCAGCGGCAGCCCCAAGAAGAAG | |
| | CGGAAGGTGGACGGCAGCCCCAAGAAGAAGCGGAAGGTGGACAGCGGCTGA | |
| Cas9 ORF | ATGGACAAGAAGTACAGCATCGGCCTGGACATCGGCACCAACAGCGTGGGCTGGGCCGTGATCACCGACGAGTACAAGGTGCCCAG | 321 |
| using low | CAAGAAGTTCAAGGTGCTGGGCAACACCGACCGGCACAGCATCAAGAAGAACCTGATCGGCGCCCTGCTGTTCGACAGCGGCGAGA | |
| A/U codons | CCGCCGAGGCCACCCGGCTGAAGCGGACCGCCCGGCGGCGGTACACCCGGCGGAAGAACCGGATCTGCTACCTGCAGGAGATCTTC | |
| of Table 4, | AGCAACGAGATGGCCAAGGTGGACGACAGCTTCTTCCACCGGCTGGAGGAGAGCTTCCTGGTGGAGGAGGACAAGAAGCACGAGCG | |
| with start | GCACCCCATCTTCGGCAACATCGTGGACGAGGTGGCCTACCACGAGAAGTACCCCACCATCTACCACCTGCGGAAGAAGCTGGTGG | |
| and stop | ACAGCACCGACAAGGCCGACCTGCGGCTGATCTACCTGGCCCTGGCCCACATGATCAAGTTCCGGGGCCACTTCCTGATCGAGGGC | |
| codons and | GACCTGAACCCCGACAACAGCGACGTGGACAAGCTGTTCATCCAGCTGGTGCAGACCTACAACCAGCTGTTCGAGGAGAACCCCAT | |
| no NLS | CAACGCCAGCGGCGTGGACGCCAAGGCCATCCTGAGCGCCCGGCTGAGCAAGAGCCGGCGGCTGGAGAACCTGATCGCCCAGCTGC | |
| | CCGGCGAGAAGAAGAACGGCCTGTTCGGCAACCTGATCGCCCTGAGCCTGGGCCTGACCCCCAACTTCAAGAGCAACTTCGACCTG | |
| | GCCGAGGACGCCAAGCTGCAGCTGAGCAAGGACACCTACGACGACGACCTGGACAACCTGCTGGCCCAGATCGGCGACCAGTACGC | |
| | CGACCTGTTCCTGGCCGCCAAGAACCTGAGCGACGCCATCCTGCTGAGCGACATCCTGCGGGTGAACACCGAGATCACCAAGGCCC | |
| | CCCTGAGCGCCAGCATGATCAAGCGGTACGACGAGCACCACCAGGACCTGACCCTGCTGAAGGCCCTGGTGCGGCAGCAGCTGCCC | |
| | GAGAAGTACAAGGAGATCTTCTTCGACCAGAGCAAGAACGGCTACGCCGGCTACATCGACGGCGGCGCCAGCCAGGAGGAGTTCTA | |
| | CAAGTTCATCAAGCCCATCCTGGAGAAGATGGACGGCACCGAGGAGCTGCTGGTGAAGCTGAACCGGGAGGACCTGCTGCGGAAGC | |
| | AGCGGACCTTCGACAACGGCAGCATCCCCCACCAGATCCACCTGGGCGAGCTGCACGCCATCCTGCGGCGGCAGGAGGACTTCTAC | |
| | CCCTTCCTGAAGGACAACCGGGAGAAGATCGAGAAGATCCTGACCTTCCGGATCCCCTACTACGTGGGCCCCCTGGCCCGGGGCAA | |
| | CAGCCGGTTCGCCTGGATGACCCGGAAGAGCGAGGAGACCATCACCCCCTGGAACTTCGAGGAGGTGGTGGACAAGGGCGCCAGCG | |
| | CCCAGAGCTTCATCGAGCGGATGACCAACTTCGACAAGAACCTGCCCAACGAGAAGGTGCTGCCCAAGCACAGCCTGCTGTACGAG | |
| | TACTTCACCGTGTACAACGAGCTGACCAAGGTGAAGTACGTGACCGAGGGCATGCGGAAGCCCGCCTTCCTGAGCGGCGAGCAGAA | |
| | GAAGGCCATCGTGGACCTGCTGTTCAAGACCAACCGGAAGGTGACCGTGAAGCAGCTGAAGGAGGACTACTTCAAGAAGATCGAGT | |
| | GCTTCGACAGCGTGGAGATCAGCGGCGTGGAGGACCGGTTCAACGCCAGCCTGGGCACCTACCACGACCTGCTGAAGATCATCAAG | |
| | GACAAGGACTTCCTGGACAACGAGGAGAACGAGGACATCCTGGAGGACATCGTGCTGACCCTGACCCTGTTCGAGGACCGGGAGAT | |
| | GATCGAGGAGCGGCTGAAGACCTACGCCCACCTGTTCGACGACAAGGTGATGAAGCAGCTGAAGCGGCGGCGGTACACCGGCTGGG | |
| | GCCGGCTGAGCCGGAAGCTGATCAACGGCATCCGGGACAAGCAGAGCGGCAAGACCATCCTGGACTTCCTGAAGAGCGACGGCTTC | |
| | GCCAACCGGAACTTCATGCAGCTGATCCACGACGACAGCCTGACCTTCAAGGAGGACATCCAGAAGGCCCAGGTGAGCGGCCAGGG | |
| | CGACAGCCTGCACGAGCACATCGCCAACCTGGCCGGCAGCCCCGCCATCAAGAAGGGCATCCTGCAGACCGTGAAGGTGGTGGACG | |
| | AGCTGGTGAAGGTGATGGGCCGGCACAAGCCCGAGAACATCGTGATCGAGATGGCCCGGGAGAACCAGACCACCCAGAAGGGCCAG | |
| | AAGAACAGCCGGGAGCGGATGAAGCGGATCGAGGAGGGCATCAAGGAGCTGGGCAGCCAGATCCTGAAGGAGCACCCCGTGGAGAA | |
| | CACCCAGCTGCAGAACGAGAAGCTGTACCTGTACTACCTGCAGAACGGCCGGGACATGTACGTGGACCAGGAGCTGGACATCAACC | |
| | GGCTGAGCGACTACGACGTGGACCACATCGTGCCCCAGAGCTTCCTGAAGGACGACAGCATCGACAACAAGGTGCTGACCCGGAGC | |
| | GACAAGAACCGGGGCAAGAGCGACAACGTGCCCAGCGAGGAGGTGGTGAAGAAGATGAAGAACTACTGGCGGCAGCTGCTGAACGC | |
| | CAAGCTGATCACCCAGCGGAAGTTCGACAACCTGACCAAGGCCGAGCGGGGCGGCCTGAGCGAGCTGGACAAGGCCGGCTTCATCA | |
| | AGCGGCAGCTGGTGGAGACCCGGCAGATCACCAAGCACGTGGCCCAGATCCTGGACAGCCGGATGAACACCAAGTACGACGAGAAC | |
| | GACAAGCTGATCCGGGAGGTGAAGGTGATCACCCTGAAGAGCAAGCTGGTGAGCGACTTCCGGAAGGACTTCCAGTTCTACAAGGT | |
| | GCGGGAGATCAACAACTACCACCACGCCCACGACGCCTACCTGAACGCCGTGGTGGGCACCGCCCTGATCAAGAAGTACCCCAAGC | |
| | TGGAGAGCGAGTTCGTGTACGGCGACTACAAGGTGTACGACGTGCGGAAGATGATCGCCAAGAGCGAGCAGGAGATCGGCAAGGCC | |
| | ACCGCCAAGTACTTCTTCTACAGCAACATCATGAACTTCTTCAAGACCGAGATCACCCTGGCCAACGGCGAGATCCGGAAGCGGCC | |
| | CCTGATCGAGACCAACGGCGAGACCGGCGAGATCGTGTGGGACAAGGGCCGGGACTTCGCCACCGTGCGGAAGGTGCTGAGCATGC | |
| | CCCAGGTGAACATCGTGAAGAAGACCGAGGTGCAGACCGGCGGCTTCAGCAAGGAGAGCATCCTGCCCAAGCGGAACAGCGACAAG | |
| | CTGATCGCCCGGAAGAAGGACTGGGACCCCAAGAAGTACGGCGGCTTCGACAGCCCCACCGTGGCCTACAGCGTGCTGGTGGTGGC | |
| | CAAGGTGGAGAAGGGCAAGAGCAAGAAGCTGAAGAGCGTGAAGGAGCTGCTGGGCATCACCATCATGGAGCGGAGCAGCTTCGAGA | |
| | AGAACCCCATCGACTTCCTGGAGGCCAAGGGCTACAAGGAGGTGAAGAAGGACCTGATCATCAAGCTGCCCAAGTACAGCCTGTTC | |
| | GAGCTGGAGAACGGCCGGAAGCGGATGCTGGCCAGCGCCGGCGAGCTGCAGAAGGGCAACGAGCTGGCCCTGCCCAGCAAGTACGT | |
| | GAACTTCCTGTACCTGGCCAGCCACTACGAGAAGCTGAAGGGCAGCCCCGAGGACAACGAGCAGAAGCAGCTGTTCGTGGAGCAGC | |
| | ACAAGCACTACCTGGACGAGATCATCGAGCAGATCAGCGAGTTCAGCAAGCGGGTGATCCTGGCCGACGCCAACCTGGACAAGGTG | |
| | CTGAGCGCCTACAACAAGCACCGGGACAAGCCCATCCGGGAGCAGGCCGAGAACATCATCCACCTGTTCACCCTGACCAACCTGGG | |
| | CGCCCCCGCCGCCTTCAAGTACTTCGACACCACCATCGACCGGAAGCGGTACACCAGCACCAAGGAGGTGCTGGACGCCACCCTGA | |
| | TCCACCAGAGCATCACCGGCCTGTACGAGACCCGGATCGACCTGAGCCAGCTGGGCGGCGACTGA | |
| Cas9 nickase | ATGGACAAGAAGTACAGCATCGGCCTGGCCATCGGCACCAACAGCGTGGGCTGGGCCGTGATCACCGACGAGTACAAGGTGCCCAG | 322 |
| ORF using | CAAGAAGTTCAAGGTGCTGGGCAACACCGACCGGCACAGCATCAAGAAGAACCTGATCGGCGCCCTGCTGTTCGACAGCGGCGAGA | |
| low A/U | CCGCCGAGGCCACCCGGCTGAAGCGGACCGCCCGGCGGCGGTACACCCGGCGGAAGAACCGGATCTGCTACCTGCAGGAGATCTTC | |
| codons of | AGCAACGAGATGGCCAAGGTGGACGACAGCTTCTTCCACCGGCTGGAGGAGAGCTTCCTGGTGGAGGAGGACAAGAAGCACGAGCG | |
| Table 4, | GCACCCCATCTTCGGCAACATCGTGGACGAGGTGGCCTACCACGAGAAGTACCCCACCATCTACCACCTGCGGAAGAAGCTGGTGG | |
| with start | ACAGCACCGACAAGGCCGACCTGCGGCTGATCTACCTGGCCCTGGCCCACATGATCAAGTTCCGGGGCCACTTCCTGATCGAGGGC | |
| and stop | GACCTGAACCCCGACAACAGCGACGTGGACAAGCTGTTCATCCAGCTGGTGCAGACCTACAACCAGCTGTTCGAGGAGAACCCCAT | |
| codons | CAACGCCAGCGGCGTGGACGCCAAGGCCATCCTGAGCGCCCGGCTGAGCAAGAGCCGGCGGCTGGAGAACCTGATCGCCCAGCTGC | |
| | CCGGCGAGAAGAAGAACGGCCTGTTCGGCAACCTGATCGCCCTGAGCCTGGGCCTGACCCCCAACTTCAAGAGCAACTTCGACCTG | |
| | GCCGAGGACGCCAAGCTGCAGCTGAGCAAGGACACCTACGACGACGACCTGGACAACCTGCTGGCCCAGATCGGCGACCAGTACGC | |
| | CGACCTGTTCCTGGCCGCCAAGAACCTGAGCGACGCCATCCTGCTGAGCGACATCCTGCGGGTGAACACCGAGATCACCAAGGCCC | |
| | CCCTGAGCGCCAGCATGATCAAGCGGTACGACGAGCACCACCAGGACCTGACCCTGCTGAAGGCCCTGGTGCGGCAGCAGCTGCCC | |
| | GAGAAGTACAAGGAGATCTTCTTCGACCAGAGCAAGAACGGCTACGCCGGCTACATCGACGGCGGCGCCAGCCAGGAGGAGTTCTA | |
| | CAAGTTCATCAAGCCCATCCTGGAGAAGATGGACGGCACCGAGGAGCTGCTGGTGAAGCTGAACCGGGAGGACCTGCTGCGGAAGC | |
| | AGCGGACCTTCGACAACGGCAGCATCCCCCACCAGATCCACCTGGGCGAGCTGCACGCCATCCTGCGGCGGCAGGAGGACTTCTAC | |
| | CCCTTCCTGAAGGACAACCGGGAGAAGATCGAGAAGATCCTGACCTTCCGGATCCCCTACTACGTGGGCCCCCTGGCCCGGGGCAA | |
| | CAGCCGGTTCGCCTGGATGACCCGGAAGAGCGAGGAGACCATCACCCCCTGGAACTTCGAGGAGGTGGTGGACAAGGGCGCCAGCG | |
| | CCCAGAGCTTCATCGAGCGGATGACCAACTTCGACAAGAACCTGCCCAACGAGAAGGTGCTGCCCAAGCACAGCCTGCTGTACGAG | |
| | TACTTCACCGTGTACAACGAGCTGACCAAGGTGAAGTACGTGACCGAGGGCATGCGGAAGCCCGCCTTCCTGAGCGGCGAGCAGAA | |
| | GAAGGCCATCGTGGACCTGCTGTTCAAGACCAACCGGAAGGTGACCGTGAAGCAGCTGAAGGAGGACTACTTCAAGAAGATCGAGT | |
| | GCTTCGACAGCGTGGAGATCAGCGGCGTGGAGGACCGGTTCAACGCCAGCCTGGGCACCTACCACGACCTGCTGAAGATCATCAAG | |
| | GACAAGGACTTCCTGGACAACGAGGAGAACGAGGACATCCTGGAGGACATCGTGCTGACCCTGACCCTGTTCGAGGACCGGGAGAT | |
| | GATCGAGGAGCGGCTGAAGACCTACGCCCACCTGTTCGACGACAAGGTGATGAAGCAGCTGAAGCGGCGGCGGTACACCGGCTGGG | |
| | GCCGGCTGAGCCGGAAGCTGATCAACGGCATCCGGGACAAGCAGAGCGGCAAGACCATCCTGGACTTCCTGAAGAGCGACGGCTTC | |
| | GCCAACCGGAACTTCATGCAGCTGATCCACGACGACAGCCTGACCTTCAAGGAGGACATCCAGAAGGCCCAGGTGAGCGGCCAGGG | |
| | CGACAGCCTGCACGAGCACATCGCCAACCTGGCCGGCAGCCCCGCCATCAAGAAGGGCATCCTGCAGACCGTGAAGGTGGTGGACG | |
| | AGCTGGTGAAGGTGATGGGCCGGCACAAGCCCGAGAACATCGTGATCGAGATGGCCCGGGAGAACCAGACCACCCAGAAGGGCCAG | |
| | AAGAACAGCCGGGAGCGGATGAAGCGGATCGAGGAGGGCATCAAGGAGCTGGGCAGCCAGATCCTGAAGGAGCACCCCGTGGAGAA | |
| | CACCCAGCTGCAGAACGAGAAGCTGTACCTGTACTACCTGCAGAACGGCCGGGACATGTACGTGGACCAGGAGCTGGACATCAACC | |
| | GGCTGAGCGACTACGACGTGGACCACATCGTGCCCCAGAGCTTCCTGAAGGACGACAGCATCGACAACAAGGTGCTGACCCGGAGC | |
| | GACAAGAACCGGGGCAAGAGCGACAACGTGCCCAGCGAGGAGGTGGTGAAGAAGATGAAGAACTACTGGCGGCAGCTGCTGAACGC | |
| | CAAGCTGATCACCCAGCGGAAGTTCGACAACCTGACCAAGGCCGAGCGGGGCGGCCTGAGCGAGCTGGACAAGGCCGGCTTCATCA | |
| | AGCGGCAGCTGGTGGAGACCCGGCAGATCACCAAGCACGTGGCCCAGATCCTGGACAGCCGGATGAACACCAAGTACGACGAGAAC | |
| | GACAAGCTGATCCGGGAGGTGAAGGTGATCACCCTGAAGAGCAAGCTGGTGAGCGACTTCCGGAAGGACTTCCAGTTCTACAAGGT | |
| | GCGGGAGATCAACAACTACCACCACGCCCACGACGCCTACCTGAACGCCGTGGTGGGCACCGCCCTGATCAAGAAGTACCCCAAGC | |
| | TGGAGAGCGAGTTCGTGTACGGCGACTACAAGGTGTACGACGTGCGGAAGATGATCGCCAAGAGCGAGCAGGAGATCGGCAAGGCC | |
| | ACCGCCAAGTACTTCTTCTACAGCAACATCATGAACTTCTTCAAGACCGAGATCACCCTGGCCAACGGCGAGATCCGGAAGCGGCC | |
| | CCTGATCGAGACCAACGGCGAGACCGGCGAGATCGTGTGGGACAAGGGCCGGGACTTCGCCACCGTGCGGAAGGTGCTGAGCATGC | |
| | CCCAGGTGAACATCGTGAAGAAGACCGAGGTGCAGACCGGCGGCTTCAGCAAGGAGAGCATCCTGCCCAAGCGGAACAGCGACAAG | |
| | CTGATCGCCCGGAAGAAGGACTGGGACCCCAAGAAGTACGGCGGCTTCGACAGCCCCACCGTGGCCTACAGCGTGCTGGTGGTGGC | |
| | CAAGGTGGAGAAGGGCAAGAGCAAGAAGCTGAAGAGCGTGAAGGAGCTGCTGGGCATCACCATCATGGAGCGGAGCAGCTTCGAGA | |
| | AGAACCCCATCGACTTCCTGGAGGCCAAGGGCTACAAGGAGGTGAAGAAGGACCTGATCATCAAGCTGCCCAAGTACAGCCTGTTC | |
| | GAGCTGGAGAACGGCCGGAAGCGGATGCTGGCCAGCGCCGGCGAGCTGCAGAAGGGCAACGAGCTGGCCCTGCCCAGCAAGTACGT | |
| | GAACTTCCTGTACCTGGCCAGCCACTACGAGAAGCTGAAGGGCAGCCCCGAGGACAACGAGCAGAAGCAGCTGTTCGTGGAGCAGC | |
| | ACAAGCACTACCTGGACGAGATCATCGAGCAGATCAGCGAGTTCAGCAAGCGGGTGATCCTGGCCGACGCCAACCTGGACAAGGTG | |
| | CTGAGCGCCTACAACAAGCACCGGGACAAGCCCATCCGGGAGCAGGCCGAGAACATCATCCACCTGTTCACCCTGACCAACCTGGG | |
| | CGCCCCCGCCGCCTTCAAGTACTTCGACACCACCATCGACCGGAAGCGGTACACCAGCACCAAGGAGGTGCTGGACGCCACCCTGA | |
| | TCCACCAGAGCATCACCGGCCTGTACGAGACCCGGATCGACCTGAGCCAGCTGGGCGGCGACGGCGGCGGCAGCCCCAAGAAGAAG | |
| | CGGAAGGTGTGA | |
| Cas9 nickase | ATGGACAAGAAGTACAGCATCGGCCTGGCCATCGGCACCAACAGCGTGGGCTGGGCCGTGATCACCGACGAGTACAAGGTGCCCAG | 323 |
| ORF using | CAAGAAGTTCAAGGTGCTGGGCAACACCGACCGGCACAGCATCAAGAAGAACCTGATCGGCGCCCTGCTGTTCGACAGCGGCGAGA | |
| low A/U | CCGCCGAGGCCACCCGGCTGAAGCGGACCGCCCGGCGGCGGTACACCCGGCGGAAGAACCGGATCTGCTACCTGCAGGAGATCTTC | |
| codons of | AGCAACGAGATGGCCAAGGTGGACGACAGCTTCTTCCACCGGCTGGAGGAGAGCTTCCTGGTGGAGGAGGACAAGAAGCACGAGCG | |
| Table 4, | GCACCCCATCTTCGGCAACATCGTGGACGAGGTGGCCTACCACGAGAAGTACCCCACCATCTACCACCTGCGGAAGAAGCTGGTGG | |
| with two C- | ACAGCACCGACAAGGCCGACCTGCGGCTGATCTACCTGGCCCTGGCCCACATGATCAAGTTCCGGGGCCACTTCCTGATCGAGGGC | |
| terminal NLS | GACCTGAACCCCGACAACAGCGACGTGGACAAGCTGTTCATCCAGCTGGTGCAGACCTACAACCAGCTGTTCGAGGAGAACCCCAT | |
| sequences | CAACGCCAGCGGCGTGGACGCCAAGGCCATCCTGAGCGCCCGGCTGAGCAAGAGCCGGCGGCTGGAGAACCTGATCGCCCAGCTGC | |
| and start | CCGGCGAGAAGAAGAACGGCCTGTTCGGCAACCTGATCGCCCTGAGCCTGGGCCTGACCCCCAACTTCAAGAGCAACTTCGACCTG | |
| and stop | GCCGAGGACGCCAAGCTGCAGCTGAGCAAGGACACCTACGACGACGACCTGGACAACCTGCTGGCCCAGATCGGCGACCAGTACGC | |
| codons | CGACCTGTTCCTGGCCGCCAAGAACCTGAGCGACGCCATCCTGCTGAGCGACATCCTGCGGGTGAACACCGAGATCACCAAGGCCC | |
| | CCCTGAGCGCCAGCATGATCAAGCGGTACGACGAGCACCACCAGGACCTGACCCTGCTGAAGGCCCTGGTGCGGCAGCAGCTGCCC | |
| | GAGAAGTACAAGGAGATCTTCTTCGACCAGAGCAAGAACGGCTACGCCGGCTACATCGACGGCGGCGCCAGCCAGGAGGAGTTCTA | |
| | CAAGTTCATCAAGCCCATCCTGGAGAAGATGGACGGCACCGAGGAGCTGCTGGTGAAGCTGAACCGGGAGGACCTGCTGCGGAAGC | |
| | AGCGGACCTTCGACAACGGCAGCATCCCCCACCAGATCCACCTGGGCGAGCTGCACGCCATCCTGCGGCGGCAGGAGGACTTCTAC | |
| | CCCTTCCTGAAGGACAACCGGGAGAAGATCGAGAAGATCCTGACCTTCCGGATCCCCTACTACGTGGGCCCCCTGGCCCGGGGCAA | |
| | CAGCCGGTTCGCCTGGATGACCCGGAAGAGCGAGGAGACCATCACCCCCTGGAACTTCGAGGAGGTGGTGGACAAGGGCGCCAGCG | |
| | CCCAGAGCTTCATCGAGCGGATGACCAACTTCGACAAGAACCTGCCCAACGAGAAGGTGCTGCCCAAGCACAGCCTGCTGTACGAG | |
| | TACTTCACCGTGTACAACGAGCTGACCAAGGTGAAGTACGTGACCGAGGGCATGCGGAAGCCCGCCTTCCTGAGCGGCGAGCAGAA | |
| | GAAGGCCATCGTGGACCTGCTGTTCAAGACCAACCGGAAGGTGACCGTGAAGCAGCTGAAGGAGGACTACTTCAAGAAGATCGAGT | |
| | GCTTCGACAGCGTGGAGATCAGCGGCGTGGAGGACCGGTTCAACGCCAGCCTGGGCACCTACCACGACCTGCTGAAGATCATCAAG | |
| | GACAAGGACTTCCTGGACAACGAGGAGAACGAGGACATCCTGGAGGACATCGTGCTGACCCTGACCCTGTTCGAGGACCGGGAGAT | |
| | GATCGAGGAGCGGCTGAAGACCTACGCCCACCTGTTCGACGACAAGGTGATGAAGCAGCTGAAGCGGCGGCGGTACACCGGCTGGG | |
| | GCCGGCTGAGCCGGAAGCTGATCAACGGCATCCGGGACAAGCAGAGCGGCAAGACCATCCTGGACTTCCTGAAGAGCGACGGCTTC | |
| | GCCAACCGGAACTTCATGCAGCTGATCCACGACGACAGCCTGACCTTCAAGGAGGACATCCAGAAGGCCCAGGTGAGCGGCCAGGG | |
| | CGACAGCCTGCACGAGCACATCGCCAACCTGGCCGGCAGCCCCGCCATCAAGAAGGGCATCCTGCAGACCGTGAAGGTGGTGGACG | |
| | AGCTGGTGAAGGTGATGGGCCGGCACAAGCCCGAGAACATCGTGATCGAGATGGCCCGGGAGAACCAGACCACCCAGAAGGGCCAG | |
| | AAGAACAGCCGGGAGCGGATGAAGCGGATCGAGGAGGGCATCAAGGAGCTGGGCAGCCAGATCCTGAAGGAGCACCCCGTGGAGAA | |
| | CACCCAGCTGCAGAACGAGAAGCTGTACCTGTACTACCTGCAGAACGGCCGGGACATGTACGTGGACCAGGAGCTGGACATCAACC | |
| | GGCTGAGCGACTACGACGTGGACCACATCGTGCCCCAGAGCTTCCTGAAGGACGACAGCATCGACAACAAGGTGCTGACCCGGAGC | |
| | GACAAGAACCGGGGCAAGAGCGACAACGTGCCCAGCGAGGAGGTGGTGAAGAAGATGAAGAACTACTGGCGGCAGCTGCTGAACGC | |
| | CAAGCTGATCACCCAGCGGAAGTTCGACAACCTGACCAAGGCCGAGCGGGGCGGCCTGAGCGAGCTGGACAAGGCCGGCTTCATCA | |
| | AGCGGCAGCTGGTGGAGACCCGGCAGATCACCAAGCACGTGGCCCAGATCCTGGACAGCCGGATGAACACCAAGTACGACGAGAAC | |
| | GACAAGCTGATCCGGGAGGTGAAGGTGATCACCCTGAAGAGCAAGCTGGTGAGCGACTTCCGGAAGGACTTCCAGTTCTACAAGGT | |
| | GCGGGAGATCAACAACTACCACCACGCCCACGACGCCTACCTGAACGCCGTGGTGGGCACCGCCCTGATCAAGAAGTACCCCAAGC | |
| | TGGAGAGCGAGTTCGTGTACGGCGACTACAAGGTGTACGACGTGCGGAAGATGATCGCCAAGAGCGAGCAGGAGATCGGCAAGGCC | |
| | ACCGCCAAGTACTTCTTCTACAGCAACATCATGAACTTCTTCAAGACCGAGATCACCCTGGCCAACGGCGAGATCCGGAAGCGGCC | |
| | CCTGATCGAGACCAACGGCGAGACCGGCGAGATCGTGTGGGACAAGGGCCGGGACTTCGCCACCGTGCGGAAGGTGCTGAGCATGC | |
| | CCCAGGTGAACATCGTGAAGAAGACCGAGGTGCAGACCGGCGGCTTCAGCAAGGAGAGCATCCTGCCCAAGCGGAACAGCGACAAG | |
| | CTGATCGCCCGGAAGAAGGACTGGGACCCCAAGAAGTACGGCGGCTTCGACAGCCCCACCGTGGCCTACAGCGTGCTGGTGGTGGC | |
| | CAAGGTGGAGAAGGGCAAGAGCAAGAAGCTGAAGAGCGTGAAGGAGCTGCTGGGCATCACCATCATGGAGCGGAGCAGCTTCGAGA | |
| | AGAACCCCATCGACTTCCTGGAGGCCAAGGGCTACAAGGAGGTGAAGAAGGACCTGATCATCAAGCTGCCCAAGTACAGCCTGTTC | |
| | GAGCTGGAGAACGGCCGGAAGCGGATGCTGGCCAGCGCCGGCGAGCTGCAGAAGGGCAACGAGCTGGCCCTGCCCAGCAAGTACGT | |
| | GAACTTCCTGTACCTGGCCAGCCACTACGAGAAGCTGAAGGGCAGCCCCGAGGACAACGAGCAGAAGCAGCTGTTCGTGGAGCAGC | |
| | ACAAGCACTACCTGGACGAGATCATCGAGCAGATCAGCGAGTTCAGCAAGCGGGTGATCCTGGCCGACGCCAACCTGGACAAGGTG | |
| | CTGAGCGCCTACAACAAGCACCGGGACAAGCCCATCCGGGAGCAGGCCGAGAACATCATCCACCTGTTCACCCTGACCAACCTGGG | |
| | CGCCCCCGCCGCCTTCAAGTACTTCGACACCACCATCGACCGGAAGCGGTACACCAGCACCAAGGAGGTGCTGGACGCCACCCTGA | |
| | TCCACCAGAGCATCACCGGCCTGTACGAGACCCGGATCGACCTGAGCCAGCTGGGCGGCGACGGCAGCGGCAGCCCCAAGAAGAAG | |
| | CGGAAGGTGGACGGCAGCCCCAAGAAGAAGCGGAAGGTGGACAGCGGCTGA | |
| Cas9 nickase | ATGGACAAGAAGTACAGCATCGGCCTGGcCATCGGCACCAACAGCGTGGGCTGGGCCGTGATCACCGACGAGTACAAGGTGCCCAG | 324 |
| ORF using | CAAGAAGTTCAAGGTGCTGGGCAACACCGACCGGCACAGCATCAAGAAGAACCTGATCGGCGCCCTGCTGTTCGACAGCGGCGAGA | |
| low A/U | CCGCCGAGGCCACCCGGCTGAAGCGGACCGCCCGGCGGCGGTACACCCGGCGGAAGAACCGGATCTGCTACCTGCAGGAGATCTTC | |
| codons of | AGCAACGAGATGGCCAAGGTGGACGACAGCTTCTTCCACCGGCTGGAGGAGAGCTTCCTGGTGGAGGAGGACAAGAAGCACGAGCG | |
| Table 4, | GCACCCCATCTTCGGCAACATCGTGGACGAGGTGGCCTACCACGAGAAGTACCCCACCATCTACCACCTGCGGAAGAAGCTGGTGG | |
| with start | ACAGCACCGACAAGGCCGACCTGCGGCTGATCTACCTGGCCCTGGCCCACATGATCAAGTTCCGGGGCCACTTCCTGATCGAGGGC | |
| and stop | GACCTGAACCCCGACAACAGCGACGTGGACAAGCTGTTCATCCAGCTGGTGCAGACCTACAACCAGCTGTTCGAGGAGAACCCCAT | |
| codons and | CAACGCCAGCGGCGTGGACGCCAAGGCCATCCTGAGCGCCCGGCTGAGCAAGAGCCGGCGGCTGGAGAACCTGATCGCCCAGCTGC | |
| no NLS | CCGGCGAGAAGAAGAACGGCCTGTTCGGCAACCTGATCGCCCTGAGCCTGGGCCTGACCCCCAACTTCAAGAGCAACTTCGACCTG | |
| | GCCGAGGACGCCAAGCTGCAGCTGAGCAAGGACACCTACGACGACGACCTGGACAACCTGCTGGCCCAGATCGGCGACCAGTACGC | |
| | CGACCTGTTCCTGGCCGCCAAGAACCTGAGCGACGCCATCCTGCTGAGCGACATCCTGCGGGTGAACACCGAGATCACCAAGGCCC | |
| | CCCTGAGCGCCAGCATGATCAAGCGGTACGACGAGCACCACCAGGACCTGACCCTGCTGAAGGCCCTGGTGCGGCAGCAGCTGCCC | |
| | GAGAAGTACAAGGAGATCTTCTTCGACCAGAGCAAGAACGGCTACGCCGGCTACATCGACGGCGGCGCCAGCCAGGAGGAGTTCTA | |
| | CAAGTTCATCAAGCCCATCCTGGAGAAGATGGACGGCACCGAGGAGCTGCTGGTGAAGCTGAACCGGGAGGACCTGCTGCGGAAGC | |
| | AGCGGACCTTCGACAACGGCAGCATCCCCCACCAGATCCACCTGGGCGAGCTGCACGCCATCCTGCGGCGGCAGGAGGACTTCTAC | |
| | CCCTTCCTGAAGGACAACCGGGAGAAGATCGAGAAGATCCTGACCTTCCGGATCCCCTACTACGTGGGCCCCCTGGCCCGGGGCAA | |
| | CAGCCGGTTCGCCTGGATGACCCGGAAGAGCGAGGAGACCATCACCCCCTGGAACTTCGAGGAGGTGGTGGACAAGGGCGCCAGCG | |
| | CCCAGAGCTTCATCGAGCGGATGACCAACTTCGACAAGAACCTGCCCAACGAGAAGGTGCTGCCCAAGCACAGCCTGCTGTACGAG | |
| | TACTTCACCGTGTACAACGAGCTGACCAAGGTGAAGTACGTGACCGAGGGCATGCGGAAGCCCGCCTTCCTGAGCGGCGAGCAGAA | |
| | GAAGGCCATCGTGGACCTGCTGTTCAAGACCAACCGGAAGGTGACCGTGAAGCAGCTGAAGGAGGACTACTTCAAGAAGATCGAGT | |
| | GCTTCGACAGCGTGGAGATCAGCGGCGTGGAGGACCGGTTCAACGCCAGCCTGGGCACCTACCACGACCTGCTGAAGATCATCAAG | |
| | GACAAGGACTTCCTGGACAACGAGGAGAACGAGGACATCCTGGAGGACATCGTGCTGACCCTGACCCTGTTCGAGGACCGGGAGAT | |
| | GATCGAGGAGCGGCTGAAGACCTACGCCCACCTGTTCGACGACAAGGTGATGAAGCAGCTGAAGCGGCGGCGGTACACCGGCTGGG | |
| | GCCGGCTGAGCCGGAAGCTGATCAACGGCATCCGGGACAAGCAGAGCGGCAAGACCATCCTGGACTTCCTGAAGAGCGACGGCTTC | |
| | GCCAACCGGAACTTCATGCAGCTGATCCACGACGACAGCCTGACCTTCAAGGAGGACATCCAGAAGGCCCAGGTGAGCGGCCAGGG | |
| | CGACAGCCTGCACGAGCACATCGCCAACCTGGCCGGCAGCCCCGCCATCAAGAAGGGCATCCTGCAGACCGTGAAGGTGGTGGACG | |
| | AGCTGGTGAAGGTGATGGGCCGGCACAAGCCCGAGAACATCGTGATCGAGATGGCCCGGGAGAACCAGACCACCCAGAAGGGCCAG | |
| | AAGAACAGCCGGGAGCGGATGAAGCGGATCGAGGAGGGCATCAAGGAGCTGGGCAGCCAGATCCTGAAGGAGCACCCCGTGGAGAA | |
| | CACCCAGCTGCAGAACGAGAAGCTGTACCTGTACTACCTGCAGAACGGCCGGGACATGTACGTGGACCAGGAGCTGGACATCAACC | |
| | GGCTGAGCGACTACGACGTGGACCACATCGTGCCCCAGAGCTTCCTGAAGGACGACAGCATCGACAACAAGGTGCTGACCCGGAGC | |
| | GACAAGAACCGGGGCAAGAGCGACAACGTGCCCAGCGAGGAGGTGGTGAAGAAGATGAAGAACTACTGGCGGCAGCTGCTGAACGC | |
| | CAAGCTGATCACCCAGCGGAAGTTCGACAACCTGACCAAGGCCGAGCGGGGCGGCCTGAGCGAGCTGGACAAGGCCGGCTTCATCA | |
| | AGCGGCAGCTGGTGGAGACCCGGCAGATCACCAAGCACGTGGCCCAGATCCTGGACAGCCGGATGAACACCAAGTACGACGAGAAC | |
| | GACAAGCTGATCCGGGAGGTGAAGGTGATCACCCTGAAGAGCAAGCTGGTGAGCGACTTCCGGAAGGACTTCCAGTTCTACAAGGT | |
| | GCGGGAGATCAACAACTACCACCACGCCCACGACGCCTACCTGAACGCCGTGGTGGGCACCGCCCTGATCAAGAAGTACCCCAAGC | |
| | TGGAGAGCGAGTTCGTGTACGGCGACTACAAGGTGTACGACGTGCGGAAGATGATCGCCAAGAGCGAGCAGGAGATCGGCAAGGCC | |
| | ACCGCCAAGTACTTCTTCTACAGCAACATCATGAACTTCTTCAAGACCGAGATCACCCTGGCCAACGGCGAGATCCGGAAGCGGCC | |
| | CCTGATCGAGACCAACGGCGAGACCGGCGAGATCGTGTGGGACAAGGGCCGGGACTTCGCCACCGTGCGGAAGGTGCTGAGCATGC | |
| | CCCAGGTGAACATCGTGAAGAAGACCGAGGTGCAGACCGGCGGCTTCAGCAAGGAGAGCATCCTGCCCAAGCGGAACAGCGACAAG | |
| | CTGATCGCCCGGAAGAAGGACTGGGACCCCAAGAAGTACGGCGGCTTCGACAGCCCCACCGTGGCCTACAGCGTGCTGGTGGTGGC | |
| | CAAGGTGGAGAAGGGCAAGAGCAAGAAGCTGAAGAGCGTGAAGGAGCTGCTGGGCATCACCATCATGGAGCGGAGCAGCTTCGAGA | |
| | AGAACCCCATCGACTTCCTGGAGGCCAAGGGCTACAAGGAGGTGAAGAAGGACCTGATCATCAAGCTGCCCAAGTACAGCCTGTTC | |
| | GAGCTGGAGAACGGCCGGAAGCGGATGCTGGCCAGCGCCGGCGAGCTGCAGAAGGGCAACGAGCTGGCCCTGCCCAGCAAGTACGT | |
| | GAACTTCCTGTACCTGGCCAGCCACTACGAGAAGCTGAAGGGCAGCCCCGAGGACAACGAGCAGAAGCAGCTGTTCGTGGAGCAGC | |
| | ACAAGCACTACCTGGACGAGATCATCGAGCAGATCAGCGAGTTCAGCAAGCGGGTGATCCTGGCCGACGCCAACCTGGACAAGGTG | |
| | CTGAGCGCCTACAACAAGCACCGGGACAAGCCCATCCGGGAGCAGGCCGAGAACATCATCCACCTGTTCACCCTGACCAACCTGGG | |
| | CGCCCCCGCCGCCTTCAAGTACTTCGACACCACCATCGACCGGAAGCGGTACACCAGCACCAAGGAGGTGCTGGACGCCACCCTGA | |
| | TCCACCAGAGCATCACCGGCCTGTACGAGACCCGGATCGACCTGAGCCAGCTGGGCGGCGACTGA | |
| dCas9 ORF | ATGGACAAGAAGTACAGCATCGGCCTGGcCATCGGCACCAACAGCGTGGGCTGGGCCGTGATCACCGACGAGTACAAGGTGCCCAG | 325 |
| using | CAAGAAGTTCAAGGTGCTGGGCAACACCGACCGGCACAGCATCAAGAAGAACCTGATCGGCGCCCTGCTGTTCGACAGCGGCGAGA | |
| A/U codons | CCGCCGAGGCCACCCGGCTGAAGCGGACCGCCCGGCGGCGGTACACCCGGCGGAAGAACCGGATCTGCTACCTGCAGGAGATCTTC | |
| of Table 4, | AGCAACGAGATGGCCAAGGTGGACGACAGCTTCTTCCACCGGCTGGAGGAGAGCTTCCTGGTGGAGGAGGACAAGAAGCACGAGCG | |
| with start | GCACCCCATCTTCGGCAACATCGTGGACGAGGTGGCCTACCACGAGAAGTACCCCACCATCTACCACCTGCGGAAGAAGCTGGTGG | |
| and stop | ACAGCACCGACAAGGCCGACCTGCGGCTGATCTACCTGGCCCTGGCCCACATGATCAAGTTCCGGGGCCACTTCCTGATCGAGGGC | |
| codons | GACCTGAACCCCGACAACAGCGACGTGGACAAGCTGTTCATCCAGCTGGTGCAGACCTACAACCAGCTGTTCGAGGAGAACCCCAT | |
| | CAACGCCAGCGGCGTGGACGCCAAGGCCATCCTGAGCGCCCGGCTGAGCAAGAGCCGGCGGCTGGAGAACCTGATCGCCCAGCTGC | |
| | CCGGCGAGAAGAAGAACGGCCTGTTCGGCAACCTGATCGCCCTGAGCCTGGGCCTGACCCCCAACTTCAAGAGCAACTTCGACCTG | |
| | GCCGAGGACGCCAAGCTGCAGCTGAGCAAGGACACCTACGACGACGACCTGGACAACCTGCTGGCCCAGATCGGCGACCAGTACGC | |
| | CGACCTGTTCCTGGCCGCCAAGAACCTGAGCGACGCCATCCTGCTGAGCGACATCCTGCGGGTGAACACCGAGATCACCAAGGCCC | |
| | CCCTGAGCGCCAGCATGATCAAGCGGTACGACGAGCACCACCAGGACCTGACCCTGCTGAAGGCCCTGGTGCGGCAGCAGCTGCCC | |
| | GAGAAGTACAAGGAGATCTTCTTCGACCAGAGCAAGAACGGCTACGCCGGCTACATCGACGGCGGCGCCAGCCAGGAGGAGTTCTA | |
| | CAAGTTCATCAAGCCCATCCTGGAGAAGATGGACGGCACCGAGGAGCTGCTGGTGAAGCTGAACCGGGAGGACCTGCTGCGGAAGC | |
| | AGCGGACCTTCGACAACGGCAGCATCCCCCACCAGATCCACCTGGGCGAGCTGCACGCCATCCTGCGGCGGCAGGAGGACTTCTAC | |
| | CCCTTCCTGAAGGACAACCGGGAGAAGATCGAGAAGATCCTGACCTTCCGGATCCCCTACTACGTGGGCCCCCTGGCCCGGGGCAA | |
| | CAGCCGGTTCGCCTGGATGACCCGGAAGAGCGAGGAGACCATCACCCCCTGGAACTTCGAGGAGGTGGTGGACAAGGGCGCCAGCG | |
| | CCCAGAGCTTCATCGAGCGGATGACCAACTTCGACAAGAACCTGCCCAACGAGAAGGTGCTGCCCAAGCACAGCCTGCTGTACGAG | |
| | TACTTCACCGTGTACAACGAGCTGACCAAGGTGAAGTACGTGACCGAGGGCATGCGGAAGCCCGCCTTCCTGAGCGGCGAGCAGAA | |
| | GAAGGCCATCGTGGACCTGCTGTTCAAGACCAACCGGAAGGTGACCGTGAAGCAGCTGAAGGAGGACTACTTCAAGAAGATCGAGT | |
| | GCTTCGACAGCGTGGAGATCAGCGGCGTGGAGGACCGGTTCAACGCCAGCCTGGGCACCTACCACGACCTGCTGAAGATCATCAAG | |
| | GACAAGGACTTCCTGGACAACGAGGAGAACGAGGACATCCTGGAGGACATCGTGCTGACCCTGACCCTGTTCGAGGACCGGGAGAT | |
| | GATCGAGGAGCGGCTGAAGACCTACGCCCACCTGTTCGACGACAAGGTGATGAAGCAGCTGAAGCGGCGGCGGTACACCGGCTGGG | |
| | GCCGGCTGAGCCGGAAGCTGATCAACGGCATCCGGGACAAGCAGAGCGGCAAGACCATCCTGGACTTCCTGAAGAGCGACGGCTTC | |
| | GCCAACCGGAACTTCATGCAGCTGATCCACGACGACAGCCTGACCTTCAAGGAGGACATCCAGAAGGCCCAGGTGAGCGGCCAGGG | |
| | CGACAGCCTGCACGAGCACATCGCCAACCTGGCCGGCAGCCCCGCCATCAAGAAGGGCATCCTGCAGACCGTGAAGGTGGTGGACG | |
| | AGCTGGTGAAGGTGATGGGCCGGCACAAGCCCGAGAACATCGTGATCGAGATGGCCCGGGAGAACCAGACCACCCAGAAGGGCCAG | |
| | AAGAACAGCCGGGAGCGGATGAAGCGGATCGAGGAGGGCATCAAGGAGCTGGGCAGCCAGATCCTGAAGGAGCACCCCGTGGAGAA | |
| | CACCCAGCTGCAGAACGAGAAGCTGTACCTGTACTACCTGCAGAACGGCCGGGACATGTACGTGGACCAGGAGCTGGACATCAACC | |
| | GGCTGAGCGACTACGACGTGGACgcCATCGTGCCCCAGAGCTTCCTGAAGGACGACAGCATCGACAACAAGGTGCTGACCCGGAGC | |
| | GACAAGAACCGGGGCAAGAGCGACAACGTGCCCAGCGAGGAGGTGGTGAAGAAGATGAAGAACTACTGGCGGCAGCTGCTGAACGC | |
| | CAAGCTGATCACCCAGCGGAAGTTCGACAACCTGACCAAGGCCGAGCGGGGCGGCCTGAGCGAGCTGGACAAGGCCGGCTTCATCA | |
| | AGCGGCAGCTGGTGGAGACCCGGCAGATCACCAAGCACGTGGCCCAGATCCTGGACAGCCGGATGAACACCAAGTACGACGAGAAC | |
| | GACAAGCTGATCCGGGAGGTGAAGGTGATCACCCTGAAGAGCAAGCTGGTGAGCGACTTCCGGAAGGACTTCCAGTTCTACAAGGT | |
| | GCGGGAGATCAACAACTACCACCACGCCCACGACGCCTACCTGAACGCCGTGGTGGGCACCGCCCTGATCAAGAAGTACCCCAAGC | |
| | TGGAGAGCGAGTTCGTGTACGGCGACTACAAGGTGTACGACGTGCGGAAGATGATCGCCAAGAGCGAGCAGGAGATCGGCAAGGCC | |
| | ACCGCCAAGTACTTCTTCTACAGCAACATCATGAACTTCTTCAAGACCGAGATCACCCTGGCCAACGGCGAGATCCGGAAGCGGCC | |
| | CCTGATCGAGACCAACGGCGAGACCGGCGAGATCGTGTGGGACAAGGGCCGGGACTTCGCCACCGTGCGGAAGGTGCTGAGCATGC | |
| | CCCAGGTGAACATCGTGAAGAAGACCGAGGTGCAGACCGGCGGCTTCAGCAAGGAGAGCATCCTGCCCAAGCGGAACAGCGACAAG | |
| | CTGATCGCCCGGAAGAAGGACTGGGACCCCAAGAAGTACGGCGGCTTCGACAGCCCCACCGTGGCCTACAGCGTGCTGGTGGTGGC | |
| | CAAGGTGGAGAAGGGCAAGAGCAAGAAGCTGAAGAGCGTGAAGGAGCTGCTGGGCATCACCATCATGGAGCGGAGCAGCTTCGAGA | |
| | AGAACCCCATCGACTTCCTGGAGGCCAAGGGCTACAAGGAGGTGAAGAAGGACCTGATCATCAAGCTGCCCAAGTACAGCCTGTTC | |
| | GAGCTGGAGAACGGCCGGAAGCGGATGCTGGCCAGCGCCGGCGAGCTGCAGAAGGGCAACGAGCTGGCCCTGCCCAGCAAGTACGT | |
| | GAACTTCCTGTACCTGGCCAGCCACTACGAGAAGCTGAAGGGCAGCCCCGAGGACAACGAGCAGAAGCAGCTGTTCGTGGAGCAGC | |
| | ACAAGCACTACCTGGACGAGATCATCGAGCAGATCAGCGAGTTCAGCAAGCGGGTGATCCTGGCCGACGCCAACCTGGACAAGGTG | |
| | CTGAGCGCCTACAACAAGCACCGGGACAAGCCCATCCGGGAGCAGGCCGAGAACATCATCCACCTGTTCACCCTGACCAACCTGGG | |
| | CGCCCCCGCCGCCTTCAAGTACTTCGACACCACCATCGACCGGAAGCGGTACACCAGCACCAAGGAGGTGCTGGACGCCACCCTGA | |
| | TCCACCAGAGCATCACCGGCCTGTACGAGACCCGGATCGACCTGAGCCAGCTGGGCGGCGACGGCGGCGGCAGCCCCAAGAAGAAG | |
| | CGGAAGGTGTGA | |
| dCas9 ORF | ATGGACAAGAAGTACAGCATCGGCCTGGCCATCGGCACCAACAGCGTGGGCTGGGCCGTGATCACCGACGAGTACAAGGTGCCCAG | 326 |
| using low | CAAGAAGTTCAAGGTGCTGGGCAACACCGACCGGCACAGCATCAAGAAGAACCTGATCGGCGCCCTGCTGTTCGACAGCGGCGAGA | |
| A/U codons | CCGCCGAGGCCACCCGGCTGAAGCGGACCGCCCGGCGGCGGTACACCCGGCGGAAGAACCGGATCTGCTACCTGCAGGAGATCTTC | |
| of Table 4, | AGCAACGAGATGGCCAAGGTGGACGACAGCTTCTTCCACCGGCTGGAGGAGAGCTTCCTGGTGGAGGAGGACAAGAAGCACGAGCG | |
| with two C- | GCACCCCATCTTCGGCAACATCGTGGACGAGGTGGCCTACCACGAGAAGTACCCCACCATCTACCACCTGCGGAAGAAGCTGGTGG | |
| terminal NLS | ACAGCACCGACAAGGCCGACCTGCGGCTGATCTACCTGGCCCTGGCCCACATGATCAAGTTCCGGGGCCACTTCCTGATCGAGGGC | |
| sequences | GACCTGAACCCCGACAACAGCGACGTGGACAAGCTGTTCATCCAGCTGGTGCAGACCTACAACCAGCTGTTCGAGGAGAACCCCAT | |
| and start | CAACGCCAGCGGCGTGGACGCCAAGGCCATCCTGAGCGCCCGGCTGAGCAAGAGCCGGCGGCTGGAGAACCTGATCGCCCAGCTGC | |
| and stop | CCGGCGAGAAGAAGAACGGCCTGTTCGGCAACCTGATCGCCCTGAGCCTGGGCCTGACCCCCAACTTCAAGAGCAACTTCGACCTG | |
| codons | GCCGAGGACGCCAAGCTGCAGCTGAGCAAGGACACCTACGACGACGACCTGGACAACCTGCTGGCCCAGATCGGCGACCAGTACGC | |
| | CGACCTGTTCCTGGCCGCCAAGAACCTGAGCGACGCCATCCTGCTGAGCGACATCCTGCGGGTGAACACCGAGATCACCAAGGCCC | |
| | CCCTGAGCGCCAGCATGATCAAGCGGTACGACGAGCACCACCAGGACCTGACCCTGCTGAAGGCCCTGGTGCGGCAGCAGCTGCCC | |
| | GAGAAGTACAAGGAGATCTTCTTCGACCAGAGCAAGAACGGCTACGCCGGCTACATCGACGGCGGCGCCAGCCAGGAGGAGTTCTA | |
| | CAAGTTCATCAAGCCCATCCTGGAGAAGATGGACGGCACCGAGGAGCTGCTGGTGAAGCTGAACCGGGAGGACCTGCTGCGGAAGC | |
| | AGCGGACCTTCGACAACGGCAGCATCCCCCACCAGATCCACCTGGGCGAGCTGCACGCCATCCTGCGGCGGCAGGAGGACTTCTAC | |
| | CCCTTCCTGAAGGACAACCGGGAGAAGATCGAGAAGATCCTGACCTTCCGGATCCCCTACTACGTGGGCCCCCTGGCCCGGGGCAA | |
| | CAGCCGGTTCGCCTGGATGACCCGGAAGAGCGAGGAGACCATCACCCCCTGGAACTTCGAGGAGGTGGTGGACAAGGGCGCCAGCG | |
| | CCCAGAGCTTCATCGAGCGGATGACCAACTTCGACAAGAACCTGCCCAACGAGAAGGTGCTGCCCAAGCACAGCCTGCTGTACGAG | |
| | TACTTCACCGTGTACAACGAGCTGACCAAGGTGAAGTACGTGACCGAGGGCATGCGGAAGCCCGCCTTCCTGAGCGGCGAGCAGAA | |
| | GAAGGCCATCGTGGACCTGCTGTTCAAGACCAACCGGAAGGTGACCGTGAAGCAGCTGAAGGAGGACTACTTCAAGAAGATCGAGT | |
| | GCTTCGACAGCGTGGAGATCAGCGGCGTGGAGGACCGGTTCAACGCCAGCCTGGGCACCTACCACGACCTGCTGAAGATCATCAAG | |
| | GACAAGGACTTCCTGGACAACGAGGAGAACGAGGACATCCTGGAGGACATCGTGCTGACCCTGACCCTGTTCGAGGACCGGGAGAT | |
| | GATCGAGGAGCGGCTGAAGACCTACGCCCACCTGTTCGACGACAAGGTGATGAAGCAGCTGAAGCGGCGGCGGTACACCGGCTGGG | |
| | GCCGGCTGAGCCGGAAGCTGATCAACGGCATCCGGGACAAGCAGAGCGGCAAGACCATCCTGGACTTCCTGAAGAGCGACGGCTTC | |
| | GCCAACCGGAACTTCATGCAGCTGATCCACGACGACAGCCTGACCTTCAAGGAGGACATCCAGAAGGCCCAGGTGAGCGGCCAGGG | |
| | CGACAGCCTGCACGAGCACATCGCCAACCTGGCCGGCAGCCCCGCCATCAAGAAGGGCATCCTGCAGACCGTGAAGGTGGTGGACG | |
| | AGCTGGTGAAGGTGATGGGCCGGCACAAGCCCGAGAACATCGTGATCGAGATGGCCCGGGAGAACCAGACCACCCAGAAGGGCCAG | |
| | AAGAACAGCCGGGAGCGGATGAAGCGGATCGAGGAGGGCATCAAGGAGCTGGGCAGCCAGATCCTGAAGGAGCACCCCGTGGAGAA | |
| | CACCCAGCTGCAGAACGAGAAGCTGTACCTGTACTACCTGCAGAACGGCCGGGACATGTACGTGGACCAGGAGCTGGACATCAACC | |
| | GGCTGAGCGACTACGACGTGGACGCCATCGTGCCCCAGAGCTTCCTGAAGGACGACAGCATCGACAACAAGGTGCTGACCCGGAGC | |
| | GACAAGAACCGGGGCAAGAGCGACAACGTGCCCAGCGAGGAGGTGGTGAAGAAGATGAAGAACTACTGGCGGCAGCTGCTGAACGC | |
| | CAAGCTGATCACCCAGCGGAAGTTCGACAACCTGACCAAGGCCGAGCGGGGCGGCCTGAGCGAGCTGGACAAGGCCGGCTTCATCA | |
| | AGCGGCAGCTGGTGGAGACCCGGCAGATCACCAAGCACGTGGCCCAGATCCTGGACAGCCGGATGAACACCAAGTACGACGAGAAC | |
| | GACAAGCTGATCCGGGAGGTGAAGGTGATCACCCTGAAGAGCAAGCTGGTGAGCGACTTCCGGAAGGACTTCCAGTTCTACAAGGT | |
| | GCGGGAGATCAACAACTACCACCACGCCCACGACGCCTACCTGAACGCCGTGGTGGGCACCGCCCTGATCAAGAAGTACCCCAAGC | |
| | TGGAGAGCGAGTTCGTGTACGGCGACTACAAGGTGTACGACGTGCGGAAGATGATCGCCAAGAGCGAGCAGGAGATCGGCAAGGCC | |
| | ACCGCCAAGTACTTCTTCTACAGCAACATCATGAACTTCTTCAAGACCGAGATCACCCTGGCCAACGGCGAGATCCGGAAGCGGCC | |
| | CCTGATCGAGACCAACGGCGAGACCGGCGAGATCGTGTGGGACAAGGGCCGGGACTTCGCCACCGTGCGGAAGGTGCTGAGCATGC | |
| | CCCAGGTGAACATCGTGAAGAAGACCGAGGTGCAGACCGGCGGCTTCAGCAAGGAGAGCATCCTGCCCAAGCGGAACAGCGACAAG | |
| | CTGATCGCCCGGAAGAAGGACTGGGACCCCAAGAAGTACGGCGGCTTCGACAGCCCCACCGTGGCCTACAGCGTGCTGGTGGTGGC | |
| | CAAGGTGGAGAAGGGCAAGAGCAAGAAGCTGAAGAGCGTGAAGGAGCTGCTGGGCATCACCATCATGGAGCGGAGCAGCTTCGAGA | |
| | AGAACCCCATCGACTTCCTGGAGGCCAAGGGCTACAAGGAGGTGAAGAAGGACCTGATCATCAAGCTGCCCAAGTACAGCCTGTTC | |
| | GAGCTGGAGAACGGCCGGAAGCGGATGCTGGCCAGCGCCGGCGAGCTGCAGAAGGGCAACGAGCTGGCCCTGCCCAGCAAGTACGT | |
| | GAACTTCCTGTACCTGGCCAGCCACTACGAGAAGCTGAAGGGCAGCCCCGAGGACAACGAGCAGAAGCAGCTGTTCGTGGAGCAGC | |
| | ACAAGCACTACCTGGACGAGATCATCGAGCAGATCAGCGAGTTCAGCAAGCGGGTGATCCTGGCCGACGCCAACCTGGACAAGGTG | |
| | CTGAGCGCCTACAACAAGCACCGGGACAAGCCCATCCGGGAGCAGGCCGAGAACATCATCCACCTGTTCACCCTGACCAACCTGGG | |
| | CGCCCCCGCCGCCTTCAAGTACTTCGACACCACCATCGACCGGAAGCGGTACACCAGCACCAAGGAGGTGCTGGACGCCACCCTGA | |
| | TCCACCAGAGCATCACCGGCCTGTACGAGACCCGGATCGACCTGAGCCAGCTGGGCGGCGACGGCAGCGGCAGCCCCAAGAAGAAG | |
| | CGGAAGGTGGACGGCAGCCCCAAGAAGAAGCGGAAGGTGGACAGCGGCTGA | |
| dCas9 ORF | ATGGACAAGAAGTACAGCATCGGCCTGGcCATCGGCACCAACAGCGTGGGCTGGGCCGTGATCACCGACGAGTACAAGGTGCCCAG | 327 |
| using low | CAAGAAGTTCAAGGTGCTGGGCAACACCGACCGGCACAGCATCAAGAAGAACCTGATCGGCGCCCTGCTGTTCGACAGCGGCGAGA | |
| A/U codons | CCGCCGAGGCCACCCGGCTGAAGCGGACCGCCCGGCGGCGGTACACCCGGCGGAAGAACCGGATCTGCTACCTGCAGGAGATCTTC | |
| of Table 4, | AGCAACGAGATGGCCAAGGTGGACGACAGCTTCTTCCACCGGCTGGAGGAGAGCTTCCTGGTGGAGGAGGACAAGAAGCACGAGCG | |
| with start | GCACCCCATCTTCGGCAACATCGTGGACGAGGTGGCCTACCACGAGAAGTACCCCACCATCTACCACCTGCGGAAGAAGCTGGTGG | |
| and stop | ACAGCACCGACAAGGCCGACCTGCGGCTGATCTACCTGGCCCTGGCCCACATGATCAAGTTCCGGGGCCACTTCCTGATCGAGGGC | |
| codons and | GACCTGAACCCCGACAACAGCGACGTGGACAAGCTGTTCATCCAGCTGGTGCAGACCTACAACCAGCTGTTCGAGGAGAACCCCAT | |
| no NLS | CAACGCCAGCGGCGTGGACGCCAAGGCCATCCTGAGCGCCCGGCTGAGCAAGAGCCGGCGGCTGGAGAACCTGATCGCCCAGCTGC | |
| | CCGGCGAGAAGAAGAACGGCCTGTTCGGCAACCTGATCGCCCTGAGCCTGGGCCTGACCCCCAACTTCAAGAGCAACTTCGACCTG | |
| | GCCGAGGACGCCAAGCTGCAGCTGAGCAAGGACACCTACGACGACGACCTGGACAACCTGCTGGCCCAGATCGGCGACCAGTACGC | |
| | CGACCTGTTCCTGGCCGCCAAGAACCTGAGCGACGCCATCCTGCTGAGCGACATCCTGCGGGTGAACACCGAGATCACCAAGGCCC | |
| | CCCTGAGCGCCAGCATGATCAAGCGGTACGACGAGCACCACCAGGACCTGACCCTGCTGAAGGCCCTGGTGCGGCAGCAGCTGCCC | |
| | GAGAAGTACAAGGAGATCTTCTTCGACCAGAGCAAGAACGGCTACGCCGGCTACATCGACGGCGGCGCCAGCCAGGAGGAGTTCTA | |
| | CAAGTTCATCAAGCCCATCCTGGAGAAGATGGACGGCACCGAGGAGCTGCTGGTGAAGCTGAACCGGGAGGACCTGCTGCGGAAGC | |
| | AGCGGACCTTCGACAACGGCAGCATCCCCCACCAGATCCACCTGGGCGAGCTGCACGCCATCCTGCGGCGGCAGGAGGACTTCTAC | |
| | CCCTTCCTGAAGGACAACCGGGAGAAGATCGAGAAGATCCTGACCTTCCGGATCCCCTACTACGTGGGCCCCCTGGCCCGGGGCAA | |
| | CAGCCGGTTCGCCTGGATGACCCGGAAGAGCGAGGAGACCATCACCCCCTGGAACTTCGAGGAGGTGGTGGACAAGGGCGCCAGCG | |
| | CCCAGAGCTTCATCGAGCGGATGACCAACTTCGACAAGAACCTGCCCAACGAGAAGGTGCTGCCCAAGCACAGCCTGCTGTACGAG | |
| | TACTTCACCGTGTACAACGAGCTGACCAAGGTGAAGTACGTGACCGAGGGCATGCGGAAGCCCGCCTTCCTGAGCGGCGAGCAGAA | |
| | GAAGGCCATCGTGGACCTGCTGTTCAAGACCAACCGGAAGGTGACCGTGAAGCAGCTGAAGGAGGACTACTTCAAGAAGATCGAGT | |
| | GCTTCGACAGCGTGGAGATCAGCGGCGTGGAGGACCGGTTCAACGCCAGCCTGGGCACCTACCACGACCTGCTGAAGATCATCAAG | |
| | GACAAGGACTTCCTGGACAACGAGGAGAACGAGGACATCCTGGAGGACATCGTGCTGACCCTGACCCTGTTCGAGGACCGGGAGAT | |
| | GATCGAGGAGCGGCTGAAGACCTACGCCCACCTGTTCGACGACAAGGTGATGAAGCAGCTGAAGCGGCGGCGGTACACCGGCTGGG | |
| | GCCGGCTGAGCCGGAAGCTGATCAACGGCATCCGGGACAAGCAGAGCGGCAAGACCATCCTGGACTTCCTGAAGAGCGACGGCTTC | |
| | GCCAACCGGAACTTCATGCAGCTGATCCACGACGACAGCCTGACCTTCAAGGAGGACATCCAGAAGGCCCAGGTGAGCGGCCAGGG | |
| | CGACAGCCTGCACGAGCACATCGCCAACCTGGCCGGCAGCCCCGCCATCAAGAAGGGCATCCTGCAGACCGTGAAGGTGGTGGACG | |
| | AGCTGGTGAAGGTGATGGGCCGGCACAAGCCCGAGAACATCGTGATCGAGATGGCCCGGGAGAACCAGACCACCCAGAAGGGCCAG | |
| | AAGAACAGCCGGGAGCGGATGAAGCGGATCGAGGAGGGCATCAAGGAGCTGGGCAGCCAGATCCTGAAGGAGCACCCCGTGGAGAA | |
| | CACCCAGCTGCAGAACGAGAAGCTGTACCTGTACTACCTGCAGAACGGCCGGGACATGTACGTGGACCAGGAGCTGGACATCAACC | |
| | GGCTGAGCGACTACGACGTGGACgcCATCGTGCCCCAGAGCTTCCTGAAGGACGACAGCATCGACAACAAGGTGCTGACCCGGAGC | |
| | GACAAGAACCGGGGCAAGAGCGACAACGTGCCCAGCGAGGAGGTGGTGAAGAAGATGAAGAACTACTGGCGGCAGCTGCTGAACGC | |
| | CAAGCTGATCACCCAGCGGAAGTTCGACAACCTGACCAAGGCCGAGCGGGGCGGCCTGAGCGAGCTGGACAAGGCCGGCTTCATCA | |
| | AGCGGCAGCTGGTGGAGACCCGGCAGATCACCAAGCACGTGGCCCAGATCCTGGACAGCCGGATGAACACCAAGTACGACGAGAAC | |
| | GACAAGCTGATCCGGGAGGTGAAGGTGATCACCCTGAAGAGCAAGCTGGTGAGCGACTTCCGGAAGGACTTCCAGTTCTACAAGGT | |
| | GCGGGAGATCAACAACTACCACCACGCCCACGACGCCTACCTGAACGCCGTGGTGGGCACCGCCCTGATCAAGAAGTACCCCAAGC | |
| | TGGAGAGCGAGTTCGTGTACGGCGACTACAAGGTGTACGACGTGCGGAAGATGATCGCCAAGAGCGAGCAGGAGATCGGCAAGGCC | |
| | ACCGCCAAGTACTTCTTCTACAGCAACATCATGAACTTCTTCAAGACCGAGATCACCCTGGCCAACGGCGAGATCCGGAAGCGGCC | |
| | CCTGATCGAGACCAACGGCGAGACCGGCGAGATCGTGTGGGACAAGGGCCGGGACTTCGCCACCGTGCGGAAGGTGCTGAGCATGC | |
| | CCCAGGTGAACATCGTGAAGAAGACCGAGGTGCAGACCGGCGGCTTCAGCAAGGAGAGCATCCTGCCCAAGCGGAACAGCGACAAG | |
| | CTGATCGCCCGGAAGAAGGACTGGGACCCCAAGAAGTACGGCGGCTTCGACAGCCCCACCGTGGCCTACAGCGTGCTGGTGGTGGC | |
| | CAAGGTGGAGAAGGGCAAGAGCAAGAAGCTGAAGAGCGTGAAGGAGCTGCTGGGCATCACCATCATGGAGCGGAGCAGCTTCGAGA | |
| | AGAACCCCATCGACTTCCTGGAGGCCAAGGGCTACAAGGAGGTGAAGAAGGACCTGATCATCAAGCTGCCCAAGTACAGCCTGTTC | |
| | GAGCTGGAGAACGGCCGGAAGCGGATGCTGGCCAGCGCCGGCGAGCTGCAGAAGGGCAACGAGCTGGCCCTGCCCAGCAAGTACGT | |
| | GAACTTCCTGTACCTGGCCAGCCACTACGAGAAGCTGAAGGGCAGCCCCGAGGACAACGAGCAGAAGCAGCTGTTCGTGGAGCAGC | |
| | ACAAGCACTACCTGGACGAGATCATCGAGCAGATCAGCGAGTTCAGCAAGCGGGTGATCCTGGCCGACGCCAACCTGGACAAGGTG | |
| | CTGAGCGCCTACAACAAGCACCGGGACAAGCCCATCCGGGAGCAGGCCGAGAACATCATCCACCTGTTCACCCTGACCAACCTGGG | |
| | CGCCCCCGCCGCCTTCAAGTACTTCGACACCACCATCGACCGGAAGCGGTACACCAGCACCAAGGAGGTGCTGGACGCCACCCTGA | |
| | TCCACCAGAGCATCACCGGCCTGTACGAGACCCGGATCGACCTGAGCCAGCTGGGCGGCGACTGA | |
| Nme Cas9 ORF | ATGGCCGCCTTCAAGCCCAACTCCATCAACTACATCCTGGGCCTGGACATCGGCATCGCCTCCGTGGGCTGGGCCATGGTGGAGAT | 328 |
| using low A | CGACGAGGAGGAGAACCCCATCCGGCTGATCGACCTGGGCGTGCGGGTGTTCGAGCGGGCCGAGGTGCCCAAGACCGGCGACTCCC | |
| codons of | TGGCCATGGCCCGGCGGCTGGCCCGGTCCGTGCGGCGGCTGACCCGGCGGCGGGCCCACCGGCTGCTGCGGACCCGGCGGCTGCTG | |
| Table 4, | AAGCGGGAGGGCGTGCTGCAGGCCGCCAACTTCGACGAGAACGGCCTGATCAAGTCCCTGCCCAACACCCCCTGGCAGCTGCGGGC | |
| with start | CGCCGCCCTGGACCGGAAGCTGACCCCCCTGGAGTGGTCCGCCGTGCTGCTGCACCTGATCAAGCACCGGGGCTACCTGTCCCAGC | |
| and stop | GGAAGAACGAGGGCGAGACCGCCGACAAGGAGCTGGGCGCCCTGCTGAAGGGCGTGGCCGGCAACGCCCACGCCCTGCAGACCGGC | |
| codons | GACTTCCGGACCCCCGCCGAGCTGGCCCTGAACAAGTTCGAGAAGGAGTCCGGCCACATCCGGAACCAGCGGTCCGACTACTCCCA | |
| | CACCTTCTCCCGGAAGGACCTGCAGGCCGAGCTGATCCTGCTGTTCGAGAAGCAGAAGGAGTTCGGCAACCCCCACGTGTCCGGCG | |
| | GCCTGAAGGAGGGCATCGAGACCCTGCTGATGACCCAGCGGCCCGCCCTGTCCGGCGACGCCGTGCAGAAGATGCTGGGCCACTGC | |
| | ACCTTCGAGCCCGCCGAGCCCAAGGCCGCCAAGAACACCTACACCGCCGAGCGGTTCATCTGGCTGACCAAGCTGAACAACCTGCG | |
| | GATCCTGGAGCAGGGCTCCGAGCGGCCCCTGACCGACACCGAGCGGGCCACCCTGATGGACGAGCCCTACCGGAAGTCCAAGCTGA | |
| | CCTACGCCCAGGCCCGGAAGCTGCTGGGCCTGGAGGACACCGCCTTCTTCAAGGGCCTGCGGTACGGCAAGGACAACGCCGAGGCC | |
| | TCCACCCTGATGGAGATGAAGGCCTACCACGCCATCTCCCGGGCCCTGGAGAAGGAGGGCCTGAAGGACAAGAAGTCCCCCCTGAA | |
| | CCTGTCCCCCGAGCTGCAGGACGAGATCGGCACCGCCTTCTCCCTGTTCAAGACCGACGAGGACATCACCGGCCGGCTGAAGGACC | |
| | GGATCCAGCCCGAGATCCTGGAGGCCCTGCTGAAGCACATCTCCTTCGACAAGTTCGTGCAGATCTCCCTGAAGGCCCTGCGGCGG | |
| | ATCGTGCCCCTGATGGAGCAGGGCAAGCGGTACGACGAGGCCTGCGCCGAGATCTACGGCGACCACTACGGCAAGAAGAACACCGA | |
| | GGAGAAGATCTACCTGCCCCCCATCCCCGCCGACGAGATCCGGAACCCCGTGGTGCTGCGGGCCCTGTCCCAGGCCCGGAAGGTGA | |
| | TCAACGGCGTGGTGCGGCGGTACGGCTCCCCCGCCCGGATCCACATCGAGACCGCCCGGGAGGTGGGCAAGTCCTTCAAGGACCGG | |
| | AAGGAGATCGAGAAGCGGCAGGAGGAGAACCGGAAGGACCGGGAGAAGGCCGCCGCCAAGTTCCGGGAGTACTTCCCCAACTTCGT | |
| | GGGCGAGCCCAAGTCCAAGGACATCCTGAAGCTGCGGCTGTACGAGCAGCAGCACGGCAAGTGCCTGTACTCCGGCAAGGAGATCA | |
| | ACCTGGGCCGGCTGAACGAGAAGGGCTACGTGGAGATCGACCACGCCCTGCCCTTCTCCCGGACCTGGGACGACTCCTTCAACAAC | |
| | AAGGTGCTGGTGCTGGGCTCCGAGAACCAGAACAAGGGCAACCAGACCCCCTACGAGTACTTCAACGGCAAGGACAACTCCCGGGA | |
| | GTGGCAGGAGTTCAAGGCCCGGGTGGAGACCTCCCGGTTCCCCCGGTCCAAGAAGCAGCGGATCCTGCTGCAGAAGTTCGACGAGG | |
| | ACGGCTTCAAGGAGCGGAACCTGAACGACACCCGGTACGTGAACCGGTTCCTGTGCCAGTTCGTGGCCGACCGGATGCGGCTGACC | |
| | GGCAAGGGCAAGAAGCGGGTGTTCGCCTCCAACGGCCAGATCACCAACCTGCTGCGGGGCTTCTGGGGCCTGCGGAAGGTGCGGGC | |
| | CGAGAACGACCGGCACCACGCCCTGGACGCCGTGGTGGTGGCCTGCTCCACCGTGGCCATGCAGCAGAAGATCACCCGGTTCGTGC | |
| | GGTACAAGGAGATGAACGCCTTCGACGGCAAGACCATCGACAAGGAGACCGGCGAGGTGCTGCACCAGAAGACCCACTTCCCCCAG | |
| | CCCTGGGAGTTCTTCGCCCAGGAGGTGATGATCCGGGTGTTCGGCAAGCCCGACGGCAAGCCCGAGTTCGAGGAGGCCGACACCCT | |
| | GGAGAAGCTGCGGACCCTGCTGGCCGAGAAGCTGTCCTCCCGGCCCGAGGCCGTGCACGAGTACGTGACCCCCCTGTTCGTGTCCC | |
| | GGGCCCCCAACCGGAAGATGTCCGGCCAGGGCCACATGGAGACCGTGAAGTCCGCCAAGCGGCTGGACGAGGGCGTGTCCGTGCTG | |
| | CGGGTGCCCCTGACCCAGCTGAAGCTGAAGGACCTGGAGAAGATGGTGAACCGGGAGCGGGAGCCCAAGCTGTACGAGGCCCTGAA | |
| | GGCCCGGCTGGAGGCCCACAAGGACGACCCCGCCAAGGCCTTCGCCGAGCCCTTCTACAAGTACGACAAGGCCGGCAACCGGACCC | |
| | AGCAGGTGAAGGCCGTGCGGGTGGAGCAGGTGCAGAAGACCGGCGTGTGGGTGCGGAACCACAACGGCATCGCCGACAACGCCACC | |
| | ATGGTGCGGGTGGACGTGTTCGAGAAGGGCGACAAGTACTACCTGGTGCCCATCTACTCCTGGCAGGTGGCCAAGGGCATCCTGCC | |
| | CGACCGGGCCGTGGTGCAGGGCAAGGACGAGGAGGACTGGCAGCTGATCGACGACTCCTTCAACTTCAAGTTCTCCCTGCACCCCA | |
| | ACGACCTGGTGGAGGTGATCACCAAGAAGGCCCGGATGTTCGGCTACTTCGCCTCCTGCCACCGGGGCACCGGCAACATCAACATC | |
| | CGGATCCACGACCTGGACCACAAGATCGGCAAGAACGGCATCCTGGAGGGCATCGGCGTGAAGACCGCCCTGTCCTTCCAGAAGTA | |
| | CCAGATCGACGAGCTGGGCAAGGAGATCCGGCCCTGCCGGCTGAAGAAGCGGCCCCCCGTGCGGTCCGGCAAGCGGACCGCCGACG | |
| | GCTCCGAGTTCGAGTCCCCCAAGAAGAAGCGGAAGGTGGAGTGA | |
| Nme Cas9 ORF | ATGGCCGCCTTCAAGCCCAACAGCATCAACTACATCCTGGGCCTGGACATCGGCATCGCCAGCGTGGGCTGGGCCATGGTGGAGAT | 329 |
| using low | CGACGAGGAGGAGAACCCCATCCGGCTGATCGACCTGGGCGTGCGGGTGTTCGAGCGGGCCGAGGTGCCCAAGACCGGCGACAGCC | |
| A/U codons | TGGCCATGGCCCGGCGGCTGGCCCGGAGCGTGCGGCGGCTGACCCGGCGGCGGGCCCACCGGCTGCTGCGGACCCGGCGGCTGCTG | |
| of Table 4, | AAGCGGGAGGGCGTGCTGCAGGCCGCCAACTTCGACGAGAACGGCCTGATCAAGAGCCTGCCCAACACCCCCTGGCAGCTGCGGGC | |
| with start | CGCCGCCCTGGACCGGAAGCTGACCCCCCTGGAGTGGAGCGCCGTGCTGCTGCACCTGATCAAGCACCGGGGCTACCTGAGCCAGC | |
| and stop | GGAAGAACGAGGGCGAGACCGCCGACAAGGAGCTGGGCGCCCTGCTGAAGGGCGTGGCCGGCAACGCCCACGCCCTGCAGACCGGC | |
| codons | GACTTCCGGACCCCCGCCGAGCTGGCCCTGAACAAGTTCGAGAAGGAGAGCGGCCACATCCGGAACCAGCGGAGCGACTACAGCCA | |
| | CACCTTCAGCCGGAAGGACCTGCAGGCCGAGCTGATCCTGCTGTTCGAGAAGCAGAAGGAGTTCGGCAACCCCCACGTGAGCGGCG | |
| | GCCTGAAGGAGGGCATCGAGACCCTGCTGATGACCCAGCGGCCCGCCCTGAGCGGCGACGCCGTGCAGAAGATGCTGGGCCACTGC | |
| | ACCTTCGAGCCCGCCGAGCCCAAGGCCGCCAAGAACACCTACACCGCCGAGCGGTTCATCTGGCTGACCAAGCTGAACAACCTGCG | |
| | GATCCTGGAGCAGGGCAGCGAGCGGCCCCTGACCGACACCGAGCGGGCCACCCTGATGGACGAGCCCTACCGGAAGAGCAAGCTGA | |
| | CCTACGCCCAGGCCCGGAAGCTGCTGGGCCTGGAGGACACCGCCTTCTTCAAGGGCCTGCGGTACGGCAAGGACAACGCCGAGGCC | |
| | AGCACCCTGATGGAGATGAAGGCCTACCACGCCATCAGCCGGGCCCTGGAGAAGGAGGGCCTGAAGGACAAGAAGAGCCCCCTGAA | |
| | CCTGAGCCCCGAGCTGCAGGACGAGATCGGCACCGCCTTCAGCCTGTTCAAGACCGACGAGGACATCACCGGCCGGCTGAAGGACC | |
| | GGATCCAGCCCGAGATCCTGGAGGCCCTGCTGAAGCACATCAGCTTCGACAAGTTCGTGCAGATCAGCCTGAAGGCCCTGCGGCGG | |
| | ATCGTGCCCCTGATGGAGCAGGGCAAGCGGTACGACGAGGCCTGCGCCGAGATCTACGGCGACCACTACGGCAAGAAGAACACCGA | |
| | GGAGAAGATCTACCTGCCCCCCATCCCCGCCGACGAGATCCGGAACCCCGTGGTGCTGCGGGCCCTGAGCCAGGCCCGGAAGGTGA | |
| | TCAACGGCGTGGTGCGGCGGTACGGCAGCCCCGCCCGGATCCACATCGAGACCGCCCGGGAGGTGGGCAAGAGCTTCAAGGACCGG | |
| | AAGGAGATCGAGAAGCGGCAGGAGGAGAACCGGAAGGACCGGGAGAAGGCCGCCGCCAAGTTCCGGGAGTACTTCCCCAACTTCGT | |
| | GGGCGAGCCCAAGAGCAAGGACATCCTGAAGCTGCGGCTGTACGAGCAGCAGCACGGCAAGTGCCTGTACAGCGGCAAGGAGATCA | |
| | ACCTGGGCCGGCTGAACGAGAAGGGCTACGTGGAGATCGACCACGCCCTGCCCTTCAGCCGGACCTGGGACGACAGCTTCAACAAC | |
| | AAGGTGCTGGTGCTGGGCAGCGAGAACCAGAACAAGGGCAACCAGACCCCCTACGAGTACTTCAACGGCAAGGACAACAGCCGGGA | |
| | GTGGCAGGAGTTCAAGGCCCGGGTGGAGACCAGCCGGTTCCCCCGGAGCAAGAAGCAGCGGATCCTGCTGCAGAAGTTCGACGAGG | |
| | ACGGCTTCAAGGAGCGGAACCTGAACGACACCCGGTACGTGAACCGGTTCCTGTGCCAGTTCGTGGCCGACCGGATGCGGCTGACC | |
| | GGCAAGGGCAAGAAGCGGGTGTTCGCCAGCAACGGCCAGATCACCAACCTGCTGCGGGGCTTCTGGGGCCTGCGGAAGGTGCGGGC | |
| | CGAGAACGACCGGCACCACGCCCTGGACGCCGTGGTGGTGGCCTGCAGCACCGTGGCCATGCAGCAGAAGATCACCCGGTTCGTGC | |
| | GGTACAAGGAGATGAACGCCTTCGACGGCAAGACCATCGACAAGGAGACCGGCGAGGTGCTGCACCAGAAGACCCACTTCCCCCAG | |
| | CCCTGGGAGTTCTTCGCCCAGGAGGTGATGATCCGGGTGTTCGGCAAGCCCGACGGCAAGCCCGAGTTCGAGGAGGCCGACACCCT | |
| | GGAGAAGCTGCGGACCCTGCTGGCCGAGAAGCTGAGCAGCCGGCCCGAGGCCGTGCACGAGTACGTGACCCCCCTGTTCGTGAGCC | |
| | GGGCCCCCAACCGGAAGATGAGCGGCCAGGGCCACATGGAGACCGTGAAGAGCGCCAAGCGGCTGGACGAGGGCGTGAGCGTGCTG | |
| | CGGGTGCCCCTGACCCAGCTGAAGCTGAAGGACCTGGAGAAGATGGTGAACCGGGAGCGGGAGCCCAAGCTGTACGAGGCCCTGAA | |
| | GGCCCGGCTGGAGGCCCACAAGGACGACCCCGCCAAGGCCTTCGCCGAGCCCTTCTACAAGTACGACAAGGCCGGCAACCGGACCC | |
| | AGCAGGTGAAGGCCGTGCGGGTGGAGCAGGTGCAGAAGACCGGCGTGTGGGTGCGGAACCACAACGGCATCGCCGACAACGCCACC | |
| | ATGGTGCGGGTGGACGTGTTCGAGAAGGGCGACAAGTACTACCTGGTGCCCATCTACAGCTGGCAGGTGGCCAAGGGCATCCTGCC | |
| | CGACCGGGCCGTGGTGCAGGGCAAGGACGAGGAGGACTGGCAGCTGATCGACGACAGCTTCAACTTCAAGTTCAGCCTGCACCCCA | |
| | ACGACCTGGTGGAGGTGATCACCAAGAAGGCCCGGATGTTCGGCTACTTCGCCAGCTGCCACCGGGGCACCGGCAACATCAACATC | |
| | CGGATCCACGACCTGGACCACAAGATCGGCAAGAACGGCATCCTGGAGGGCATCGGCGTGAAGACCGCCCTGAGCTTCCAGAAGTA | |
| | CCAGATCGACGAGCTGGGCAAGGAGATCCGGCCCTGCCGGCTGAAGAAGCGGCCCCCCGTGCGGAGCGGCAAGCGGACCGCCGACG | |
| | GCAGCGAGTTCGAGAGCCCCAAGAAGAAGCGGAAGGTGGAGTGA | |
| Open reading | ATGGACAAGAAGTACAGCATCGGACTGGACATCGGAACAAACAGCGTCGGATGGGCAGTCATCACAGACGAATACAAGGTCCCGAG | 330 |
| frame for | CAAGAAGTTCAAGGTCCTGGGAAACACAGACAGACACAGCATCAAGAAGAACCTGATCGGAGCACTGCTGTTCGACAGCGGAGAAA | |
| Cas9 with | CAGCAGAAGCAACAAGACTGAAGAGAACAGCAAGAAGAAGATACACAAGAAGAAAGAACAGAATCTGCTACCTGCAGGAAATCTTC | |
| NLS1, with | AGCAACGAAATGGCAAAGGTCGACGACAGCTTCTTCCACAGACTGGAAGAAAGCTTCCTGGTCGAAGAAGACAAGAAGCACGAAAG | |
| start and | ACACCCGATCTTCGGAAACATCGTCGACGAAGTCGCATACCACGAAAAGTACCCGACAATCTACCACCTGAGAAAGAAGCTGGTCG | |
| stop codons | ACAGCACAGACAAGGCAGACCTGAGACTGATCTACCTGGCACTGGCACACATGATCAAGTTCAGAGGACACTTCCTGATCGAAGGA | |
| | GACCTGAACCCGGACAACAGCGACGTCGACAAGCTGTTCATCCAGCTGGTCCAGACATACAACCAGCTGTTCGAAGAAAACCCGAT | |
| | CAACGCAAGCGGAGTCGACGCAAAGGCAATCCTGAGCGCAAGACTGAGCAAGAGCAGAAGACTGGAAAACCTGATCGCACAGCTGC | |
| | CGGGAGAAAAGAAGAACGGACTGTTCGGAAACCTGATCGCACTGAGCCTGGGACTGACACCGAACTTCAAGAGCAACTTCGACCTG | |
| | GCAGAAGACGCAAAGCTGCAGCTGAGCAAGGACACATACGACGACGACCTGGACAACCTGCTGGCACAGATCGGAGACCAGTACGC | |
| | AGACCTGTTCCTGGCAGCAAAGAACCTGAGCGACGCAATCCTGCTGAGCGACATCCTGAGAGTCAACACAGAAATCACAAAGGCAC | |
| | CGCTGAGCGCAAGCATGATCAAGAGATACGACGAACACCACCAGGACCTGACACTGCTGAAGGCACTGGTCAGACAGCAGCTGCCG | |
| | GAAAAGTACAAGGAAATCTTCTTCGACCAGAGCAAGAACGGATACGCAGGATACATCGACGGAGGAGCAAGCCAGGAAGAATTCTA | |
| | CAAGTTCATCAAGCCGATCCTGGAAAAGATGGACGGAACAGAAGAACTGCTGGTCAAGCTGAACAGAGAAGACCTGCTGAGAAAGC | |
| | AGAGAACATTCGACAACGGAAGCATCCCGCACCAGATCCACCTGGGAGAACTGCACGCAATCCTGAGAAGACAGGAAGACTTCTAC | |
| | CCGTTCCTGAAGGACAACAGAGAAAAGATCGAAAAGATCCTGACATTCAGAATCCCGTACTACGTCGGACCGCTGGCAAGAGGAAA | |
| | CAGCAGATTCGCATGGATGACAAGAAAGAGCGAAGAAACAATCACACCGTGGAACTTCGAAGAAGTCGTCGACAAGGGAGCAAGCG | |
| | CACAGAGCTTCATCGAAAGAATGACAAACTTCGACAAGAACCTGCCGAACGAAAAGGTCCTGCCGAAGCACAGCCTGCTGTACGAA | |
| | TACTTCACAGTCTACAACGAACTGACAAAGGTCAAGTACGTCACAGAAGGAATGAGAAAGCCGGCATTCCTGAGCGGAGAACAGAA | |
| | GAAGGCAATCGTCGACCTGCTGTTCAAGACAAACAGAAAGGTCACAGTCAAGCAGCTGAAGGAAGACTACTTCAAGAAGATCGAAT | |
| | GCTTCGACAGCGTCGAAATCAGCGGAGTCGAAGACAGATTCAACGCAAGCCTGGGAACATACCACGACCTGCTGAAGATCATCAAG | |
| | GACAAGGACTTCCTGGACAACGAAGAAAACGAAGACATCCTGGAAGACATCGTCCTGACACTGACACTGTTCGAAGACAGAGAAAT | |
| | GATCGAAGAAAGACTGAAGACATACGCACACCTGTTCGACGACAAGGTCATGAAGCAGCTGAAGAGAAGAAGATACACAGGATGGG | |
| | GAAGACTGAGCAGAAAGCTGATCAACGGAATCAGAGACAAGCAGAGCGGAAAGACAATCCTGGACTTCCTGAAGAGCGACGGATTC | |
| | GCAAACAGAAACTTCATGCAGCTGATCCACGACGACAGCCTGACATTCAAGGAAGACATCCAGAAGGCACAGGTCAGCGGACAGGG | |
| | AGACAGCCTGCACGAACACATCGCAAACCTGGCAGGAAGCCCGGCAATCAAGAAGGGAATCCTGCAGACAGTCAAGGTCGTCGACG | |
| | AACTGGTCAAGGTCATGGGAAGACACAAGCCGGAAAACATCGTCATCGAAATGGCAAGAGAAAACCAGACAACACAGAAGGGACAG | |
| | AAGAACAGCAGAGAAAGAATGAAGAGAATCGAAGAAGGAATCAAGGAACTGGGAAGCCAGATCCTGAAGGAACACCCGGTCGAAAA | |
| | CACACAGCTGCAGAACGAAAAGCTGTACCTGTACTACCTGCAGAACGGAAGAGACATGTACGTCGACCAGGAACTGGACATCAACA | |
| | GACTGAGCGACTACGACGTCGACCACATCGTCCCGCAGAGCTTCCTGAAGGACGACAGCATCGACAACAAGGTCCTGACAAGAAGC | |
| | GACAAGAACAGAGGAAAGAGCGACAACGTCCCGAGCGAAGAAGTCGTCAAGAAGATGAAGAACTACTGGAGACAGCTGCTGAACGC | |
| | AAAGCTGATCACACAGAGAAAGTTCGACAACCTGACAAAGGCAGAGAGAGGAGGACTGAGCGAACTGGACAAGGCAGGATTCATCA | |
| | AGAGACAGCTGGTCGAAACAAGACAGATCACAAAGCACGTCGCACAGATCCTGGACAGCAGAATGAACACAAAGTACGACGAAAAC | |
| | GACAAGCTGATCAGAGAAGTCAAGGTCATCACACTGAAGAGCAAGCTGGTCAGCGACTTCAGAAAGGACTTCCAGTTCTACAAGGT | |
| | CAGAGAAATCAACAACTACCACCACGCACACGACGCATACCTGAACGCAGTCGTCGGAACAGCACTGATCAAGAAGTACCCGAAGC | |
| | TGGAAAGCGAATTCGTCTACGGAGACTACAAGGTCTACGACGTCAGAAAGATGATCGCAAAGAGCGAACAGGAAATCGGAAAGGCA | |
| | ACAGCAAAGTACTTCTTCTACAGCAACATCATGAACTTCTTCAAGACAGAAATCACACTGGCAAACGGAGAAATCAGAAAGAGACC | |
| | GCTGATCGAAACAAACGGAGAAACAGGAGAAATCGTCTGGGACAAGGGAAGAGACTTCGCAACAGTCAGAAAGGTCCTGAGCATGC | |
| | CGCAGGTCAACATCGTCAAGAAGACAGAAGTCCAGACAGGAGGATTCAGCAAGGAAAGCATCCTGCCGAAGAGAAACAGCGACAAG | |
| | CTGATCGCAAGAAAGAAGGACTGGGACCCGAAGAAGTACGGAGGATTCGACAGCCCGACAGTCGCATACAGCGTCCTGGTCGTCGC | |
| | AAAGGTCGAAAAGGGAAAGAGCAAGAAGCTGAAGAGCGTCAAGGAACTGCTGGGAATCACAATCATGGAAAGAAGCAGCTTCGAAA | |
| | AGAACCCGATCGACTTCCTGGAAGCAAAGGGATACAAGGAAGTCAAGAAGGACCTGATCATCAAGCTGCCGAAGTACAGCCTGTTC | |
| | GAACTGGAAAACGGAAGAAAGAGAATGCTGGCAAGCGCAGGAGAACTGCAGAAGGGAAACGAACTGGCACTGCCGAGCAAGTACGT | |
| | CAACTTCCTGTACCTGGCAAGCCACTACGAAAAGCTGAAGGGAAGCCCGGAAGACAACGAACAGAAGCAGCTGTTCGTCGAACAGC | |
| | ACAAGCACTACCTGGACGAAATCATCGAACAGATCAGCGAATTCAGCAAGAGAGTCATCCTGGCAGACGCAAACCTGGACAAGGTC | |
| | CTGAGCGCATACAACAAGCACAGAGACAAGCCGATCAGAGAACAGGCAGAAAACATCATCCACCTGTTCACACTGACAAACCTGGG | |
| | AGCACCGGCAGCATTCAAGTACTTCGACACAACAATCGACAGAAAGAGATACACAAGCACAAAGGAAGTCCTGGACGCAACACTGA | |
| | TCCACCAGAGCATCACAGGACTGTACGAAACAAGAATCGACCTGAGCCAGCTGGGAGGAGACGGAGGAGGAAGCCTGGCAGCAAAG | |
| | AGAAGCAGAACAACATAG | |
| Open reading | ATGGACAAGAAGTACAGCATCGGACTGGACATCGGAACAAACAGCGTCGGATGGGCAGTCATCACAGACGAATACAAGGTCCCGAG | 331 |
| frame for | CAAGAAGTTCAAGGTCCTGGGAAACACAGACAGACACAGCATCAAGAAGAACCTGATCGGAGCACTGCTGTTCGACAGCGGAGAAA | |
| Cas9 with | CAGCAGAAGCAACAAGACTGAAGAGAACAGCAAGAAGAAGATACACAAGAAGAAAGAACAGAATCTGCTACCTGCAGGAAATCTTC | |
| NLS2, with | AGCAACGAAATGGCAAAGGTCGACGACAGCTTCTTCCACAGACTGGAAGAAAGCTTCCTGGTCGAAGAAGACAAGAAGCACGAAAG | |
| start and | ACACCCGATCTTCGGAAACATCGTCGACGAAGTCGCATACCACGAAAAGTACCCGACAATCTACCACCTGAGAAAGAAGCTGGTCG | |
| stop codons | ACAGCACAGACAAGGCAGACCTGAGACTGATCTACCTGGCACTGGCACACATGATCAAGTTCAGAGGACACTTCCTGATCGAAGGA | |
| | GACCTGAACCCGGACAACAGCGACGTCGACAAGCTGTTCATCCAGCTGGTCCAGACATACAACCAGCTGTTCGAAGAAAACCCGAT | |
| | CAACGCAAGCGGAGTCGACGCAAAGGCAATCCTGAGCGCAAGACTGAGCAAGAGCAGAAGACTGGAAAACCTGATCGCACAGCTGC | |
| | CGGGAGAAAAGAAGAACGGACTGTTCGGAAACCTGATCGCACTGAGCCTGGGACTGACACCGAACTTCAAGAGCAACTTCGACCTG | |
| | GCAGAAGACGCAAAGCTGCAGCTGAGCAAGGACACATACGACGACGACCTGGACAACCTGCTGGCACAGATCGGAGACCAGTACGC | |
| | AGACCTGTTCCTGGCAGCAAAGAACCTGAGCGACGCAATCCTGCTGAGCGACATCCTGAGAGTCAACACAGAAATCACAAAGGCAC | |
| | CGCTGAGCGCAAGCATGATCAAGAGATACGACGAACACCACCAGGACCTGACACTGCTGAAGGCACTGGTCAGACAGCAGCTGCCG | |
| | GAAAAGTACAAGGAAATCTTCTTCGACCAGAGCAAGAACGGATACGCAGGATACATCGACGGAGGAGCAAGCCAGGAAGAATTCTA | |
| | CAAGTTCATCAAGCCGATCCTGGAAAAGATGGACGGAACAGAAGAACTGCTGGTCAAGCTGAACAGAGAAGACCTGCTGAGAAAGC | |
| | AGAGAACATTCGACAACGGAAGCATCCCGCACCAGATCCACCTGGGAGAACTGCACGCAATCCTGAGAAGACAGGAAGACTTCTAC | |
| | CCGTTCCTGAAGGACAACAGAGAAAAGATCGAAAAGATCCTGACATTCAGAATCCCGTACTACGTCGGACCGCTGGCAAGAGGAAA | |
| | CAGCAGATTCGCATGGATGACAAGAAAGAGCGAAGAAACAATCACACCGTGGAACTTCGAAGAAGTCGTCGACAAGGGAGCAAGCG | |
| | CACAGAGCTTCATCGAAAGAATGACAAACTTCGACAAGAACCTGCCGAACGAAAAGGTCCTGCCGAAGCACAGCCTGCTGTACGAA | |
| | TACTTCACAGTCTACAACGAACTGACAAAGGTCAAGTACGTCACAGAAGGAATGAGAAAGCCGGCATTCCTGAGCGGAGAACAGAA | |
| | GAAGGCAATCGTCGACCTGCTGTTCAAGACAAACAGAAAGGTCACAGTCAAGCAGCTGAAGGAAGACTACTTCAAGAAGATCGAAT | |
| | GCTTCGACAGCGTCGAAATCAGCGGAGTCGAAGACAGATTCAACGCAAGCCTGGGAACATACCACGACCTGCTGAAGATCATCAAG | |
| | GACAAGGACTTCCTGGACAACGAAGAAAACGAAGACATCCTGGAAGACATCGTCCTGACACTGACACTGTTCGAAGACAGAGAAAT | |
| | GATCGAAGAAAGACTGAAGACATACGCACACCTGTTCGACGACAAGGTCATGAAGCAGCTGAAGAGAAGAAGATACACAGGATGGG | |
| | GAAGACTGAGCAGAAAGCTGATCAACGGAATCAGAGACAAGCAGAGCGGAAAGACAATCCTGGACTTCCTGAAGAGCGACGGATTC | |
| | GCAAACAGAAACTTCATGCAGCTGATCCACGACGACAGCCTGACATTCAAGGAAGACATCCAGAAGGCACAGGTCAGCGGACAGGG | |
| | AGACAGCCTGCACGAACACATCGCAAACCTGGCAGGAAGCCCGGCAATCAAGAAGGGAATCCTGCAGACAGTCAAGGTCGTCGACG | |
| | AACTGGTCAAGGTCATGGGAAGACACAAGCCGGAAAACATCGTCATCGAAATGGCAAGAGAAAACCAGACAACACAGAAGGGACAG | |
| | AAGAACAGCAGAGAAAGAATGAAGAGAATCGAAGAAGGAATCAAGGAACTGGGAAGCCAGATCCTGAAGGAACACCCGGTCGAAAA | |
| | CACACAGCTGCAGAACGAAAAGCTGTACCTGTACTACCTGCAGAACGGAAGAGACATGTACGTCGACCAGGAACTGGACATCAACA | |
| | GACTGAGCGACTACGACGTCGACCACATCGTCCCGCAGAGCTTCCTGAAGGACGACAGCATCGACAACAAGGTCCTGACAAGAAGC | |
| | GACAAGAACAGAGGAAAGAGCGACAACGTCCCGAGCGAAGAAGTCGTCAAGAAGATGAAGAACTACTGGAGACAGCTGCTGAACGC | |
| | AAAGCTGATCACACAGAGAAAGTTCGACAACCTGACAAAGGCAGAGAGAGGAGGACTGAGCGAACTGGACAAGGCAGGATTCATCA | |
| | AGAGACAGCTGGTCGAAACAAGACAGATCACAAAGCACGTCGCACAGATCCTGGACAGCAGAATGAACACAAAGTACGACGAAAAC | |
| | GACAAGCTGATCAGAGAAGTCAAGGTCATCACACTGAAGAGCAAGCTGGTCAGCGACTTCAGAAAGGACTTCCAGTTCTACAAGGT | |
| | CAGAGAAATCAACAACTACCACCACGCACACGACGCATACCTGAACGCAGTCGTCGGAACAGCACTGATCAAGAAGTACCCGAAGC | |
| | TGGAAAGCGAATTCGTCTACGGAGACTACAAGGTCTACGACGTCAGAAAGATGATCGCAAAGAGCGAACAGGAAATCGGAAAGGCA | |
| | ACAGCAAAGTACTTCTTCTACAGCAACATCATGAACTTCTTCAAGACAGAAATCACACTGGCAAACGGAGAAATCAGAAAGAGACC | |
| | GCTGATCGAAACAAACGGAGAAACAGGAGAAATCGTCTGGGACAAGGGAAGAGACTTCGCAACAGTCAGAAAGGTCCTGAGCATGC | |
| | CGCAGGTCAACATCGTCAAGAAGACAGAAGTCCAGACAGGAGGATTCAGCAAGGAAAGCATCCTGCCGAAGAGAAACAGCGACAAG | |
| | CTGATCGCAAGAAAGAAGGACTGGGACCCGAAGAAGTACGGAGGATTCGACAGCCCGACAGTCGCATACAGCGTCCTGGTCGTCGC | |
| | AAAGGTCGAAAAGGGAAAGAGCAAGAAGCTGAAGAGCGTCAAGGAACTGCTGGGAATCACAATCATGGAAAGAAGCAGCTTCGAAA | |
| | AGAACCCGATCGACTTCCTGGAAGCAAAGGGATACAAGGAAGTCAAGAAGGACCTGATCATCAAGCTGCCGAAGTACAGCCTGTTC | |
| | GAACTGGAAAACGGPAAAAGAGAATGCTGGCAAGCGCAGGAGAACTGCAGAAGGGAAACGAACTGGCACTGCCGAGCAAGTACGT | |
| | CAACTTCCTGTACCTGGCAAGCCACTACGAAAAGCTGAAGGGAAGCCCGGAAGACAACGAACAGAAGCAGCTGTTCGTCGAACAGC | |
| | ACAAGCACTACCTGGACGAAATCATCGAACAGATCAGCGAATTCAGCAAGAGAGTCATCCTGGCAGACGCAAACCTGGACAAGGTC | |
| | CTGAGCGCATACAACAAGCACAGAGACAAGCCGATCAGAGAACAGGCAGAAAACATCATCCACCTGTTCACACTGACAAACCTGGG | |
| | AGCACCGGCAGCATTCAAGTACTTCGACACAACAATCGACAGAAAGAGATACACAAGCACAAAGGAAGTCCTGGACGCAACACTGA | |
| | TCCACCAGAGCATCACAGGACTGTACGAAACAAGAATCGACCTGAGCCAGCTGGGAGGAGACGGAGGAGGAAGCCAGGCAGCAAAG | |
| | AGAAGCAGAACAACATAG | |
| Open reading | ATGGACAAGAAGTACAGCATCGGACTGGACATCGGAACAAACAGCGTCGGATGGGCAGTCATCACAGACGAATACAAGGTCCCGAG | 332 |
| frame for | CAAGAAGTTCAAGGTCCTGGGAAACACAGACAGACACAGCATCAAGAAGAACCTGATCGGAGCACTGCTGTTCGACAGCGGAGAAA | |
| Cas9 with | CAGCAGAAGCAACAAGACTGAAGAGAACAGCAAGAAGAAGATACACAAGAAGAAAGAACAGAATCTGCTACCTGCAGGAAATCTTC | |
| NLS 3, with | AGCAACGAAATGGCAAAGGTCGACGACAGCTTCTTCCACAGACTGGAAGAAAGCTTCCTGGTCGAAGAAGACAAGAAGCACGAAAG | |
| start and | ACACCCGATCTTCGGAAACATCGTCGACGAAGTCGCATACCACGAAAAGTACCCGACAATCTACCACCTGAGAAAGAAGCTGGTCG | |
| stop codons | ACAGCACAGACAAGGCAGACCTGAGACTGATCTACCTGGCACTGGCACACATGATCAAGTTCAGAGGACACTTCCTGATCGAAGGA | |
| | GACCTGAACCCGGACAACAGCGACGTCGACAAGCTGTTCATCCAGCTGGTCCAGACATACAACCAGCTGTTCGAAGAAAACCCGAT | |
| | CAACGCAAGCGGAGTCGACGCAAAGGCAATCCTGAGCGCAAGACTGAGCAAGAGCAGAAGACTGGAAAACCTGATCGCACAGCTGC | |
| | CGGGAGAAAAGAAGAACGGACTGTTCGGAAACCTGATCGCACTGAGCCTGGGACTGACACCGAACTTCAAGAGCAACTTCGACCTG | |
| | GCAGAAGACGCAAAGCTGCAGCTGAGCAAGGACACATACGACGACGACCTGGACAACCTGCTGGCACAGATCGGAGACCAGTACGC | |
| | AGACCTGTTCCTGGCAGCAAAGAACCTGAGCGACGCAATCCTGCTGAGCGACATCCTGAGAGTCAACACAGAAATCACAAAGGCAC | |
| | CGCTGAGCGCAAGCATGATCAAGAGATACGACGAACACCACCAGGACCTGACACTGCTGAAGGCACTGGTCAGACAGCAGCTGCCG | |
| | GAAAAGTACAAGGAAATCTTCTTCGACCAGAGCAAGAACGGATACGCAGGATACATCGACGGAGGAGCAAGCCAGGAAGAATTCTA | |
| | CAAGTTCATCAAGCCGATCCTGGAAAAGATGGACGGAACAGAAGAACTGCTGGTCAAGCTGAACAGAGAAGACCTGCTGAGAAAGC | |
| | AGAGAACATTCGACAACGGAAGCATCCCGCACCAGATCCACCTGGGAGAACTGCACGCAATCCTGAGAAGACAGGAAGACTTCTAC | |
| | CCGTTCCTGAAGGACAACAGAGAAAAGATCGAAAAGATCCTGACATTCAGAATCCCGTACTACGTCGGACCGCTGGCAAGAGGAAA | |
| | CAGCAGATTCGCATGGATGACAAGAAAGAGCGAAGAAACAATCACACCGTGGAACTTCGAAGAAGTCGTCGACAAGGGAGCAAGCG | |
| | CACAGAGCTTCATCGAAAGAATGACAAACTTCGACAAGAACCTGCCGAACGAAAAGGTCCTGCCGAAGCACAGCCTGCTGTACGAA | |
| | TACTTCACAGTCTACAACGAACTGACAAAGGTCAAGTACGTCACAGAAGGAATGAGAAAGCCGGCATTCCTGAGCGGAGAACAGAA | |
| | GAAGGCAATCGTCGACCTGCTGTTCAAGACAAACAGAAAGGTCACAGTCAAGCAGCTGAAGGAAGACTACTTCAAGAAGATCGAAT | |
| | GCTTCGACAGCGTCGAAATCAGCGGAGTCGAAGACAGATTCAACGCAAGCCTGGGAACATACCACGACCTGCTGAAGATCATCAAG | |
| | GACAAGGACTTCCTGGACAACGAAGAAAACGAAGACATCCTGGAAGACATCGTCCTGACACTGACACTGTTCGAAGACAGAGAAAT | |
| | GATCGAAGAAAGACTGAAGACATACGCACACCTGTTCGACGACAAGGTCATGAAGCAGCTGAAGAGAAGAAGATACACAGGATGGG | |
| | GAAGACTGAGCAGAAAGCTGATCAACGGAATCAGAGACAAGCAGAGCGGAAAGACAATCCTGGACTTCCTGAAGAGCGACGGATTC | |
| | GCAAACAGAAACTTCATGCAGCTGATCCACGACGACAGCCTGACATTCAAGGAAGACATCCAGAAGGCACAGGTCAGCGGACAGGG | |
| | AGACAGCCTGCACGAACACATCGCAAACCTGGCAGGAAGCCCGGCAATCAAGAAGGGAATCCTGCAGACAGTCAAGGTCGTCGACG | |
| | AACTGGTCAAGGTCATGGGAAGACACAAGCCGGAAAACATCGTCATCGAAATGGCAAGAGAAAACCAGACAACACAGAAGGGACAG | |
| | AAGAACAGCAGAGAAAGAATGAAGAGAATCGAAGAAGGAATCAAGGAACTGGGAAGCCAGATCCTGAAGGAACACCCGGTCGAAAA | |
| | CACACAGCTGCAGAACGAAAAGCTGTACCTGTACTACCTGCAGAACGGAAGAGACATGTACGTCGACCAGGAACTGGACATCAACA | |
| | GACTGAGCGACTACGACGTCGACCACATCGTCCCGCAGAGCTTCCTGAAGGACGACAGCATCGACAACAAGGTCCTGACAAGAAGC | |
| | GACAAGAACAGAGGAAAGAGCGACAACGTCCCGAGCGAAGAAGTCGTCAAGAAGATGAAGAACTACTGGAGACAGCTGCTGAACGC | |
| | AAAGCTGATCACACAGAGAAAGTTCGACAACCTGACAAAGGCAGAGAGAGGAGGACTGAGCGAACTGGACAAGGCAGGATTCATCA | |
| | AGAGACAGCTGGTCGAAACAAGACAGATCACAAAGCACGTCGCACAGATCCTGGACAGCAGAATGAACACAAAGTACGACGAAAAC | |
| | GACAAGCTGATCAGAGAAGTCAAGGTCATCACACTGAAGAGCAAGCTGGTCAGCGACTTCAGAAAGGACTTCCAGTTCTACAAGGT | |
| | CAGAGAAATCAACAACTACCACCACGCACACGACGCATACCTGAACGCAGTCGTCGGAACAGCACTGATCAAGAAGTACCCGAAGC | |
| | TGGAAAGCGAATTCGTCTACGGAGACTACAAGGTCTACGACGTCAGAAAGATGATCGCAAAGAGCGAACAGGAAATCGGAAAGGCA | |
| | ACAGCAAAGTACTTCTTCTACAGCAACATCATGAACTTCTTCAAGACAGAAATCACACTGGCAAACGGAGAAATCAGAAAGAGACC | |
| | GCTGATCGAAACAAACGGAGAAACAGGAGAAATCGTCTGGGACAAGGGAAGAGACTTCGCAACAGTCAGAAAGGTCCTGAGCATGC | |
| | CGCAGGTCAACATCGTCAAGAAGACAGAAGTCCAGACAGGAGGATTCAGCAAGGAAAGCATCCTGCCGAAGAGAAACAGCGACAAG | |
| | CTGATCGCAAGAAAGAAGGACTGGGACCCGAAGAAGTACGGAGGATTCGACAGCCCGACAGTCGCATACAGCGTCCTGGTCGTCGC | |
| | AAAGGTCGAAAAGGGAAAGAGCAAGAAGCTGAAGAGCGTCAAGGAACTGCTGGGAATCACAATCATGGAAAGAAGCAGCTTCGAAA | |
| | AGAACCCGATCGACTTCCTGGAAGCAAAGGGATACAAGGAAGTCAAGAAGGACCTGATCATCAAGCTGCCGAAGTACAGCCTGTTC | |
| | GAACTGGAAAACGGAAGAAAGAGAATGCTGGCAAGCGCAGGAGAACTGCAGAAGGGAAACGAACTGGCACTGCCGAGCAAGTACGT | |
| | CAACTTCCTGTACCTGGCAAGCCACTACGAAAAGCTGAAGGGAAGCCCGGAAGACAACGAACAGAAGCAGCTGTTCGTCGAACAGC | |
| | ACAAGCACTACCTGGACGAAATCATCGAACAGATCAGCGAATTCAGCAAGAGAGTCATCCTGGCAGACGCAAACCTGGACAAGGTC | |
| | CTGAGCGCATACAACAAGCACAGAGACAAGCCGATCAGAGAACAGGCAGAAAACATCATCCACCTGTTCACACTGACAAACCTGGG | |
| | AGCACCGGCAGCATTCAAGTACTTCGACACAACAATCGACAGAAAGAGATACACAAGCACAAAGGAAGTCCTGGACGCAACACTGA | |
| | TCCACCAGAGCATCACAGGACTGTACGAAACAAGAATCGACCTGAGCCAGCTGGGAGGAGACGGAGGAGGAAGCCCGGCACCGGCA | |
| | AAGAGAGAAAGAACAACATAG | |
| Open reading | ATGGACAAGAAGTACAGCATCGGACTGGACATCGGAACAAACAGCGTCGGATGGGCAGTCATCACAGACGAATACAAGGTCCCGAG | 333 |
| frame for | CAAGAAGTTCAAGGTCCTGGGAAACACAGACAGACACAGCATCAAGAAGAACCTGATCGGAGCACTGCTGTTCGACAGCGGAGAAA | |
| Cas9 with | CAGCAGAAGCAACAAGACTGAAGAGAACAGCAAGAAGAAGATACACAAGAAGAAAGAACAGAATCTGCTACCTGCAGGAAATCTTC | |
| NLS4, with | AGCAACGAAATGGCAAAGGTCGACGACAGCTTCTTCCACAGACTGGAAGAAAGCTTCCTGGTCGAAGAAGACAAGAAGCACGAAAG | |
| start and | ACACCCGATCTTCGGAAACATCGTCGACGAAGTCGCATACCACGAAAAGTACCCGACAATCTACCACCTGAGAAAGAAGCTGGTCG | |
| stop codons | ACAGCACAGACAAGGCAGACCTGAGACTGATCTACCTGGCACTGGCACACATGATCAAGTTCAGAGGACACTTCCTGATCGAAGGA | |
| | GACCTGAACCCGGACAACAGCGACGTCGACAAGCTGTTCATCCAGCTGGTCCAGACATACAACCAGCTGTTCGAAGAAAACCCGAT | |
| | CAACGCAAGCGGAGTCGACGCAAAGGCAATCCTGAGCGCAAGACTGAGCAAGAGCAGAAGACTGGAAAACCTGATCGCACAGCTGC | |
| | CGGGAGAAAAGAAGAACGGACTGTTCGGAAACCTGATCGCACTGAGCCTGGGACTGACACCGAACTTCAAGAGCAACTTCGACCTG | |
| | GCAGAAGACGCAAAGCTGCAGCTGAGCAAGGACACATACGACGACGACCTGGACAACCTGCTGGCACAGATCGGAGACCAGTACGC | |
| | AGACCTGTTCCTGGCAGCAAAGAACCTGAGCGACGCAATCCTGCTGAGCGACATCCTGAGAGTCAACACAGAAATCACAAAGGCAC | |
| | CGCTGAGCGCAAGCATGATCAAGAGATACGACGAACACCACCAGGACCTGACACTGCTGAAGGCACTGGTCAGACAGCAGCTGCCG | |
| | GAAAAGTACAAGGAAATCTTCTTCGACCAGAGCAAGAACGGATACGCAGGATACATCGACGGAGGAGCAAGCCAGGAAGAATTCTA | |
| | CAAGTTCATCAAGCCGATCCTGGAAAAGATGGACGGAACAGAAGAACTGCTGGTCAAGCTGAACAGAGAAGACCTGCTGAGAAAGC | |
| | AGAGAACATTCGACAACGGAAGCATCCCGCACCAGATCCACCTGGGAGAACTGCACGCAATCCTGAGAAGACAGGAAGACTTCTAC | |
| | CCGTTCCTGAAGGACAACAGAGAAAAGATCGAAAAGATCCTGACATTCAGAATCCCGTACTACGTCGGACCGCTGGCAAGAGGAAA | |
| | CAGCAGATTCGCATGGATGACAAGAAAGAGCGAAGAAACAATCACACCGTGGAACTTCGAAGAAGTCGTCGACAAGGGAGCAAGCG | |
| | CACAGAGCTTCATCGAAAGAATGACAAACTTCGACAAGAACCTGCCGAACGAAAAGGTCCTGCCGAAGCACAGCCTGCTGTACGAA | |
| | TACTTCACAGTCTACAACGAACTGACAAAGGTCAAGTACGTCACAGAAGGAATGAGAAAGCCGGCATTCCTGAGCGGAGAACAGAA | |
| | GAAGGCAATCGTCGACCTGCTGTTCAAGACAAACAGAAAGGTCACAGTCAAGCAGCTGAAGGAAGACTACTTCAAGAAGATCGAAT | |
| | GCTTCGACAGCGTCGAAATCAGCGGAGTCGAAGACAGATTCAACGCAAGCCTGGGAACATACCACGACCTGCTGAAGATCATCAAG | |
| | GACAAGGACTTCCTGGACAACGAAGAAAACGAAGACATCCTGGAAGACATCGTCCTGACACTGACACTGTTCGAAGACAGAGAAAT | |
| | GATCGAAGAAAGACTGAAGACATACGCACACCTGTTCGACGACAAGGTCATGAAGCAGCTGAAGAGAAGAAGATACACAGGATGGG | |
| | GAAGACTGAGCAGAAAGCTGATCAACGGAATCAGAGACAAGCAGAGCGGAAAGACAATCCTGGACTTCCTGAAGAGCGACGGATTC | |
| | GCAAACAGAAACTTCATGCAGCTGATCCACGACGACAGCCTGACATTCAAGGAAGACATCCAGAAGGCACAGGTCAGCGGACAGGG | |
| | AGACAGCCTGCACGAACACATCGCAAACCTGGCAGGAAGCCCGGCAATCAAGAAGGGAATCCTGCAGACAGTCAAGGTCGTCGACG | |
| | AACTGGTCAAGGTCATGGGAAGACACAAGCCGGAAAACATCGTCATCGAAATGGCAAGAGAAAACCAGACAACACAGAAGGGACAG | |
| | AAGAACAGCAGAGAAAGAATGAAGAGAATCG+AGAAGGAATCAAGGAACTGGGAAGCCAGATCCTGAAGGAACACCCGGTCGAAAA | |
| | CACACAGCTGCAGAACGAAAAGCTGTACCTGTACTACCTGCAGAACGGAAGAGACATGTACGTCGACCAGGAACTGGACATCAACA | |
| | GACTGAGCGACTACGACGTCGACCACATCGTCCCGCAGAGCTTCCTGAAGGACGACAGCATCGACAACAAGGTCCTGACAAGAAGC | |
| | GACAAGAACAGAGGAAAGAGCGACAACGTCCCGAGCGAAGAAGTCGTCAAGAAGATGAAGAACTACTGGAGACAGCTGCTGAACGC | |
| | AAAGCTGATCACACAGAGAAAGTTCGACAACCTGACAAAGGCAGAGAGAGGAGGACTGAGCGAACTGGACAAGGCAGGATTCATCA | |
| | AGAGACAGCTGGTCGAAACAAGACAGATCACAAAGCACGTCGCACAGATCCTGGACAGCAGAATGAACACAAAGTACGACGAAAAC | |
| | GACAAGCTGATCAGAGAAGTCAAGGTCATCACACTGAAGAGCAAGCTGGTCAGCGACTTCAGAAAGGACTTCCAGTTCTACAAGGT | |
| | CAGAGAAATCAACAACTACCACCACGCACACGACGCATACCTGAACGCAGTCGTCGGAACAGCACTGATCAAGAAGTACCCGAAGC | |
| | TGGAAAGCGAATTCGTCTACGGAGACTACAAGGTCTACGACGTCAGAAAGATGATCGCAAAGAGCGAACAGGAAATCGGAAAGGCA | |
| | ACAGCAAAGTACTTCTTCTACAGCAACATCATGAACTTCTTCAAGACAGAAATCACACTGGCAAACGGAGAAATCAGAAAGAGACC | |
| | GCTGATCGAAACAAACGGAGAAACAGGAGAAATCGTCTGGGACAAGGGAAGAGACTTCGCAACAGTCAGAAAGGTCCTGAGCATGC | |
| | CGCAGGTCAACATCGTCAAGAAGACAGAAGTCCAGACAGGAGGATTCAGCAAGGAAAGCATCCTGCCGAAGAGAAACAGCGACAAG | |
| | CTGATCGCAAGAAAGAAGGACTGGGACCCGAAGAAGTACGGAGGATTCGACAGCCCGACAGTCGCATACAGCGTCCTGGTCGTCGC | |
| | AAAGGTCGAAAAGGGAAAGAGCAAGAAGCTGAAGAGCGTCAAGGAACTGCTGGGAATCACAATCATGGAAAGAAGCAGCTTCGAAA | |
| | AGAACCCGATCGACTTCCTGGAAGCAAAGGGATACAAGGAAGTCAAGAAGGACCTGATCATCAAGCTGCCGAAGTACAGCCTGTTC | |
| | GAACTGGAAAACGGAAGAAAGAGAATGCTGGCAAGCGCAGGAGAACTGCAGAAGGGAAACGAACTGGCACTGCCGAGCAAGTACGT | |
| | CAACTTCCTGTACCTGGCAAGCCACTACGAAAAGCTGAAGGGAAGCCCGGAAGACAACGAACAGAAGCAGCTGTTCGTCGAACAGC | |
| | ACAAGCACTACCTGGACGAAATCATCGAACAGATCAGCGAATTCAGCAAGAGAGTCATCCTGGCAGACGCAAACCTGGACAAGGTC | |
| | CTGAGCGCATACAACAAGCACAGAGACAAGCCGATCAGAGAACAGGCAGAAAACATCATCCACCTGTTCACACTGACAAACCTGGG | |
| | AGCACCGGCAGCATTCAAGTACTTCGACACAACAATCGACAGAAAGAGATACACAAGCACAAAGGAAGTCCTGGACGCAACACTGA | |
| | TCCACCAGAGCATCACAGGACTGTACGAAACAAGAATCGACCTGAGCCAGCTGGGAGGAGACGGAGGAGGAAGCCAGGCAGCAAAG | |
| | AGACCGAGAACAACATAG | |
| Open reading | ATGGACAAGAAGTACAGCATCGGACTGGACATCGGAACAAACAGCGTCGGATGGGCAGTCATCACAGACGAATACAAGGTCCCGAG | 334 |
| frame for | CAAGAAGTTCAAGGTCCTGGGAAACACAGACAGACACAGCATCAAGAAGAACCTGATCGGAGCACTGCTGTTCGACAGCGGAGAAA | |
| Cas9 with | CAGCAGAAGCAACAAGACTGAAGAGAACAGCAAGAAGAAGATACACAAGAAGAAAGAACAGAATCTGCTACCTGCAGGAAATCTTC | |
| NLS 5, with | AGCAACGAAATGGCAAAGGTCGACGACAGCTTCTTCCACAGACTGGAAGAAAGCTTCCTGGTCGAAGAAGACAAGAAGCACGAAAG | |
| start and | ACACCCGATCTTCGGAAACATCGTCGACGAAGTCGCATACCACGAAAAGTACCCGACAATCTACCACCTGAGAAAGAAGCTGGTCG | |
| stop codons | ACAGCACAGACAAGGCAGACCTGAGACTGATCTACCTGGCACTGGCACACATGATCAAGTTCAGAGGACACTTCCTGATCGAAGGA | |
| | GACCTGAACCCGGACAACAGCGACGTCGACAAGCTGTTCATCCAGCTGGTCCAGACATACAACCAGCTGTTCGAAGAAAACCCGAT | |
| | CAACGCAAGCGGAGTCGACGCAAAGGCAATCCTGAGCGCAAGACTGAGCAAGAGCAGAAGACTGGAAAACCTGATCGCACAGCTGC | |
| | CGGGAGAAAAGAAGAACGGACTGTTCGGAAACCTGATCGCACTGAGCCTGGGACTGACACCGAACTTCAAGAGCAACTTCGACCTG | |
| | GCAGAAGACGCAAAGCTGCAGCTGAGCAAGGACACATACGACGACGACCTGGACAACCTGCTGGCACAGATCGGAGACCAGTACGC | |
| | AGACCTGTTCCTGGCAGCAAAGAACCTGAGCGACGCAATCCTGCTGAGCGACATCCTGAGAGTCAACACAGAAATCACAAAGGCAC | |
| | CGCTGAGCGCAAGCATGATCAAGAGATACGACGAACACCACCAGGACCTGACACTGCTGAAGGCACTGGTCAGACAGCAGCTGCCG | |
| | GAAAAGTACAAGGAAATCTTCTTCGACCAGAGCAAGAACGGATACGCAGGATACATCGACGGAGGAGCAAGCCAGGAAGAATTCTA | |
| | CAAGTTCATCAAGCCGATCCTGGAAAAGATGGACGGAACAGAAGAACTGCTGGTCAAGCTGAACAGAGAAGACCTGCTGAGAAAGC | |
| | AGAGAACATTCGACAACGGAAGCATCCCGCACCAGATCCACCTGGGAGAACTGCACGCAATCCTGAGAAGACAGGAAGACTTCTAC | |
| | CCGTTCCTGAAGGACAACAGAGAAAAGATCGAAAAGATCCTGACATTCAGAATCCCGTACTACGTCGGACCGCTGGCAAGAGGAAA | |
| | CAGCAGATTCGCATGGATGACAAGAAAGAGCGAAGAAACAATCACACCGTGGAACTTCGAAGAAGTCGTCGACAAGGGAGCAAGCG | |
| | CACAGAGCTTCATCGAAAGAATGACAAACTTCGACAAGAACCTGCCGAACGAAAAGGTCCTGCCGAAGCACAGCCTGCTGTACGAA | |
| | TACTTCACAGTCTACAACGAACTGACAAAGGTCAAGTACGTCACAGAAGGAATGAGAAAGCCGGCATTCCTGAGCGGAGAACAGAA | |
| | GAAGGCAATCGTCGACCTGCTGTTCAAGACAAACAGAAAGGTCACAGTCAAGCAGCTGAAGGAAGACTACTTCAAGAAGATCGAAT | |
| | GCTTCGACAGCGTCGAAATCAGCGGAGTCGAAGACAGATTCAACGCAAGCCTGGGAACATACCACGACCTGCTGAAGATCATCAAG | |
| | GACAAGGACTTCCTGGACAACGAAGAAAACGAAGACATCCTGGAAGACATCGTCCTGACACTGACACTGTTCGAAGACAGAGAAAT | |
| | GATCGAAGAAAGACTGAAGACATACGCACACCTGTTCGACGACAAGGTCATGAAGCAGCTGAAGAGAAGAAGATACACAGGATGGG | |
| | GAAGACTGAGCAGAAAGCTGATCAACGGAATCAGAGACAAGCAGAGCGGAAAGACAATCCTGGACTTCCTGAAGAGCGACGGATTC | |
| | GCAAACAGAAACTTCATGCAGCTGATCCACGACGACAGCCTGACATTCAAGGAAGACATCCAGAAGGCACAGGTCAGCGGACAGGG | |
| | AGACAGCCTGCACGAACACATCGCAAACCTGGCAGGAAGCCCGGCAATCAAGAAGGGAATCCTGCAGACAGTCAAGGTCGTCGACG | |
| | AACTGGTCAAGGTCATGGGAAGACACAAGCCGGAAAACATCGTCATCGAAATGGCAAGAGAAAACCAGACAACACAGAAGGGACAG | |
| | AAGAACAGCAGAGAAAGAATGAAGAGAATCGAAGAAGGAATCAAGGAACTGGGAAGCCAGATCCTGAAGGAACACCCGGTCGAAAA | |
| | CACACAGCTGCAGAACGAAAAGCTGTACCTGTACTACCTGCAGAACGGAAGAGACATGTACGTCGACCAGGAACTGGACATCAACA | |
| | GACTGAGCGACTACGACGTCGACCACATCGTCCCGCAGAGCTTCCTGAAGGACGACAGCATCGACAACAAGGTCCTGACAAGAAGC | |
| | GACAAGAACAGAGGAAAGAGCGACAACGTCCCGAGCGAAGAAGTCGTCAAGAAGATGAAGAACTACTGGAGACAGCTGCTGAACGC | |
| | AAAGCTGATCACACAGAGAAAGTTCGACAACCTGACAAAGGCAGAGAGAGGAGGACTGAGCGAACTGGACAAGGCAGGATTCATCA | |
| | AGAGACAGCTGGTCGAAACAAGACAGATCACAAAGCACGTCGCACAGATCCTGGACAGCAGAATGAACACAAAGTACGACGAAAAC | |
| | GACAAGCTGATCAGAGAAGTCAAGGTCATCACACTGAAGAGCAAGCTGGTCAGCGACTTCAGAAAGGACTTCCAGTTCTACAAGGT | |
| | CAGAGAAATCAACAACTACCACCACGCACACGACGCATACCTGAACGCAGTCGTCGGAACAGCACTGATCAAGAAGTACCCGAAGC | |
| | TGGAAAGCGAATTCGTCTACGGAGACTACAAGGTCTACGACGTCAGAAAGATGATCGCAAAGAGCGAACAGGAAATCGGAAAGGCA | |
| | ACAGCAAAGTACTTCTTCTACAGCAACATCATGAACTTCTTCAAGACAGAAATCACACTGGCAAACGGAGAAATCAGAAAGAGACC | |
| | GCTGATCGAAACAAACGGAGAAACAGGAGAAATCGTCTGGGACAAGGGAAGAGACTTCGCAACAGTCAGAAAGGTCCTGAGCATGC | |
| | CGCAGGTCAACATCGTCAAGAAGACAGAAGTCCAGACAGGAGGATTCAGCAAGGAAAGCATCCTGCCGAAGAGAAACAGCGACAAG | |
| | CTGATCGCAAGAAAGAAGGACTGGGACCCGAAGAAGTACGGAGGATTCGACAGCCCGACAGTCGCATACAGCGTCCTGGTCGTCGC | |
| | AAAGGTCGAAAAGGGAAAGAGCAAGAAGCTGAAGAGCGTCAAGGAACTGCTGGGAATCACAATCATGGAAAGAAGCAGCTTCGAAA | |
| | AGAACCCGATCGACTTCCTGGAAGCAAAGGGATACAAGGAAGTCAAGAAGGACCTGATCATCAAGCTGCCGAAGTACAGCCTGTTC | |
| | GAACTGGAAAACGGAAGAAAGAGAATGCTGGCAAGCGCAGGAGAACTGCAGAAGGGAAACGAACTGGCACTGCCGAGCAAGTACGT | |
| | CAACTTCCTGTACCTGGCAAGCCACTACGAAAAGCTGAAGGGAAGCCCGGAAGACAACGAACAGAAGCAGCTGTTCGTCGAACAGC | |
| | ACAAGCACTACCTGGACGAAATCATCGAACAGATCAGCGAATTCAGCAAGAGAGTCATCCTGGCAGACGCAAACCTGGACAAGGTC | |
| | CTGAGCGCATACAACAAGCACAGAGACAAGCCGATCAGAGAACAGGCAGAAAACATCATCCACCTGTTCACACTGACAAACCTGGG | |
| | AGCACCGGCAGCATTCAAGTACTTCGACACAACAATCGACAGAAAGAGATACACAAGCACAAAGGAAGTCCTGGACGCAACACTGA | |
| | TCCACCAGAGCATCACAGGACTGTACGAAACAAGAATCGACCTGAGCCAGCTGGGAGGAGACGGAGGAGGAAGCAGAGCAGCAAAG | |
| | AGACCGAGAACAACATAG | |
| Open reading | ATGGACAAGAAGTACAGCATCGGACTGGACATCGGAACAAACAGCGTCGGATGGGCAGTCATCACAGACGAATACAAGGTCCCGAG | 335 |
| frame for | CAAGAAGTTCAAGGTCCTGGGAAACACAGACAGACACAGCATCAAGAAGAACCTGATCGGAGCACTGCTGTTCGACAGCGGAGAAA | |
| Cas9 with | CAGCAGAAGCAACAAGACTGAAGAGAACAGCAAGAAGAAGATACACAAGAAGAAAGAACAGAATCTGCTACCTGCAGGAAATCTTC | |
| NLS 6, with | AGCAACGAAATGGCAAAGGTCGACGACAGCTTCTTCCACAGACTGGAAGAAAGCTTCCTGGTCGAAGAAGACAAGAAGCACGAAAG | |
| start and | ACACCCGATCTTCGGAAACATCGTCGACGAAGTCGCATACCACGAAAAGTACCCGACAATCTACCACCTGAGAAAGAAGCTGGTCG | |
| stop codons | ACAGCACAGACAAGGCAGACCTGAGACTGATCTACCTGGCACTGGCACACATGATCAAGTTCAGAGGACACTTCCTGATCGAAGGA | |
| | GACCTGAACCCGGACAACAGCGACGTCGACAAGCTGTTCATCCAGCTGGTCCAGACATACAACCAGCTGTTCGAAGAAAACCCGAT | |
| | CAACGCAAGCGGAGTCGACGCAAAGGCAATCCTGAGCGCAAGACTGAGCAAGAGCAGAAGACTGGAAAACCTGATCGCACAGCTGC | |
| | CGGGAGAAAAGAAGAACGGACTGTTCGGAAACCTGATCGCACTGAGCCTGGGACTGACACCGAACTTCAAGAGCAACTTCGACCTG | |
| | GCAGAAGACGCAAAGCTGCAGCTGAGCAAGGACACATACGACGACGACCTGGACAACCTGCTGGCACAGATCGGAGACCAGTACGC | |
| | AGACCTGTTCCTGGCAGCAAAGAACCTGAGCGACGCAATCCTGCTGAGCGACATCCTGAGAGTCAACACAGAAATCACAAAGGCAC | |
| | CGCTGAGCGCAAGCATGATCAAGAGATACGACGAACACCACCAGGACCTGACACTGCTGAAGGCACTGGTCAGACAGCAGCTGCCG | |
| | GAAAAGTACAAGGAAATCTTCTTCGACCAGAGCAAGAACGGATACGCAGGATACATCGACGGAGGAGCAAGCCAGGAAGAATTCTA | |
| | CAAGTTCATCAAGCCGATCCTGGAAAAGATGGACGGAACAGAAGAACTGCTGGTCAAGCTGAACAGAGAAGACCTGCTGAGAAAGC | |
| | AGAGAACATTCGACAACGGAAGCATCCCGCACCAGATCCACCTGGGAGAACTGCACGCAATCCTGAGAAGACAGGAAGACTTCTAC | |
| | CCGTTCCTGAAGGACAACAGAGAAAAGATCGAAAAGATCCTGACATTCAGAATCCCGTACTACGTCGGACCGCTGGCAAGAGGAAA | |
| | CAGCAGATTCGCATGGATGACAAGAAAGAGCGAAGAAACAATCACACCGTGGAACTTCGAAGAAGTCGTCGACAAGGGAGCAAGCG | |
| | CACAGAGCTTCATCGAAAGAATGACAAACTTCGACAAGAACCTGCCGAACGAAAAGGTCCTGCCGAAGCACAGCCTGCTGTACGAA | |
| | TACTTCACAGTCTACAACGAACTGACAAAGGTCAAGTACGTCACAGAAGGAATGAGAAAGCCGGCATTCCTGAGCGGAGAACAGAA | |
| | GAAGGCAATCGTCGACCTGCTGTTCAAGACAAACAGAAAGGTCACAGTCAAGCAGCTGAAGGAAGACTACTTCAAGAAGATCGAAT | |
| | GCTTCGACAGCGTCGAAATCAGCGGAGTCGAAGACAGATTCAACGCAAGCCTGGGAACATACCACGACCTGCTGAAGATCATCAAG | |
| | GACAAGGACTTCCTGGACAACGAAGAAAACGAAGACATCCTGGAAGACATCGTCCTGACACTGACACTGTTCGAAGACAGAGAAAT | |
| | GATCGAAGAAAGACTGAAGACATACGCACACCTGTTCGACGACAAGGTCATGAAGCAGCTGAAGAGAAGAAGATACACAGGATGGG | |
| | GAAGACTGAGCAGAAAGCTGATCAACGGAATCAGAGACAAGCAGAGCGGAAAGACAATCCTGGACTTCCTGAAGAGCGACGGATTC | |
| | GCAAACAGAAACTTCATGCAGCTGATCCACGACGACAGCCTGACATTCAAGGAAGACATCCAGAAGGCACAGGTCAGCGGACAGGG | |
| | AGACAGCCTGCACGAACACATCGCAAACCTGGCAGGAAGCCCGGCAATCAAGAAGGGAATCCTGCAGACAGTCAAGGTCGTCGACG | |
| | AACTGGTCAAGGTCATGGGAAGACACAAGCCGGAAAACATCGTCATCGAAATGGCAAGAGAAAACCAGACAACACAGAAGGGACAG | |
| | AAGAACAGCAGAGAAAGAATGAAGAGAATCG+AGAAGGAATCAAGGAACTGGGAAGCCAGATCCTGAAGGAACACCCGGTCGAAAA | |
| | CACACAGCTGCAGAACGAAAAGCTGTACCTGTACTACCTGCAGAACGGAAGAGACATGTACGTCGACCAGGAACTGGACATCAACA | |
| | GACTGAGCGACTACGACGTCGACCACATCGTCCCGCAGAGCTTCCTGAAGGACGACAGCATCGACAACAAGGTCCTGACAAGAAGC | |
| | GACAAGAACAGAGGAAAGAGCGACAACGTCCCGAGCGAAGAAGTCGTCAAGAAGATGAAGAACTACTGGAGACAGCTGCTGAACGC | |
| | AAAGCTGATCACACAGAGAAAGTTCGACAACCTGACAAAGGCAGAGAGAGGAGGACTGAGCGAACTGGACAAGGCAGGATTCATCA | |
| | AGAGACAGCTGGTCGAAACAAGACAGATCACAAAGCACGTCGCACAGATCCTGGACAGCAGAATGAACACAAAGTACGACGAAAAC | |
| | GACAAGCTGATCAGAGAAGTCAAGGTCATCACACTGAAGAGCAAGCTGGTCAGCGACTTCAGAAAGGACTTCCAGTTCTACAAGGT | |
| | CAGAGAAATCAACAACTACCACCACGCACACGACGCATACCTGAACGCAGTCGTCGGAACAGCACTGATCAAGAAGTACCCGAAGC | |
| | TGGAAAGCGAATTCGTCTACGGAGACTACAAGGTCTACGACGTCAGAAAGATGATCGCAAAGAGCGAACAGGAAATCGGAAAGGCA | |
| | ACAGCAAAGTACTTCTTCTACAGCAACATCATGAACTTCTTCAAGACAGAAATCACACTGGCAAACGGAGAAATCAGAAAGAGACC | |
| | GCTGATCGAAACAAACGGAGAAACAGGAGAAATCGTCTGGGACAAGGGAAGAGACTTCGCAACAGTCAGAAAGGTCCTGAGCATGC | |
| | CGCAGGTCAACATCGTCAAGAAGACAGAAGTCCAGACAGGAGGATTCAGCAAGGAAAGCATCCTGCCGAAGAGAAACAGCGACAAG | |
| | CTGATCGCAAGAAAGAAGGACTGGGACCCGAAGAAGTACGGAGGATTCGACAGCCCGACAGTCGCATACAGCGTCCTGGTCGTCGC | |
| | AAAGGTCGAAAAGGGAAAGAGCAAGAAGCTGAAGAGCGTCAAGGAACTGCTGGGAATCACAATCATGGAAAGAAGCAGCTTCGAAA | |
| | AGAACCCGATCGACTTCCTGGAAGCAAAGGGATACAAGGAAGTCAAGAAGGACCTGATCATCAAGCTGCCGAAGTACAGCCTGTTC | |
| | GAACTGGAAAACGGAAGAAAGAGAATGCTGGCAAGCGCAGGAGAACTGCAGAAGGGAAACGAACTGGCACTGCCGAGCAAGTACGT | |
| | CAACTTCCTGTACCTGGCAAGCCACTACGAAAAGCTGAAGGGAAGCCCGGAAGACAACGAACAGAAGCAGCTGTTCGTCGAACAGC | |
| | ACAAGCACTACCTGGACGAAATCATCGAACAGATCAGCGAATTCAGCAAGAGAGTCATCCTGGCAGACGCAAACCTGGACAAGGTC | |
| | CTGAGCGCATACAACAAGCACAGAGACAAGCCGATCAGAGAACAGGCAGAAAACATCATCCACCTGTTCACACTGACAAACCTGGG | |
| | AGCACCGGCAGCATTCAAGTACTTCGACACAACAATCGACAGAAAGAGATACACAAGCACAAAGGAAGTCCTGGACGCAACACTGA | |
| | TCCACCAGAGCATCACAGGACTGTACGAAACAAGAATCGACCTGAGCCAGCTGGGAGGAGACGGAGGAGGAAGCGCAGCAGCAAAG | |
| | AGAAGCTGGAGCATGGCAGCATAG | |
| Open reading | ATGGACAAGAAGTACAGCATCGGACTGGACATCGGAACAAACAGCGTCGGATGGGCAGTCATCACAGACGAATACAAGGTCCCGAG | 336 |
| frame for | CAAGAAGTTCAAGGTCCTGGGAAACACAGACAGACACAGCATCAAGAAGAACCTGATCGGAGCACTGCTGTTCGACAGCGGAGAAA | |
| Cas9 with | CAGCAGAAGCAACAAGACTGAAGAGAACAGCAAGAAGAAGATACACAAGAAGAAAGAACAGAATCTGCTACCTGCAGGAAATCTTC | |
| NLS7, with | AGCAACGAAATGGCAAAGGTCGACGACAGCTTCTTCCACAGACTGGAAGAAAGCTTCCTGGTCGAAGAAGACAAGAAGCACGAAAG | |
| start and | ACACCCGATCTTCGGAAACATCGTCGACGAAGTCGCATACCACGAAAAGTACCCGACAATCTACCACCTGAGAAAGAAGCTGGTCG | |
| stop codons | ACAGCACAGACAAGGCAGACCTGAGACTGATCTACCTGGCACTGGCACACATGATCAAGTTCAGAGGACACTTCCTGATCGAAGGA | |
| | GACCTGAACCCGGACAACAGCGACGTCGACAAGCTGTTCATCCAGCTGGTCCAGACATACAACCAGCTGTTCGAAGAAAACCCGAT | |
| | CAACGCAAGCGGAGTCGACGCAAAGGCAATCCTGAGCGCAAGACTGAGCAAGAGCAGAAGACTGGAAAACCTGATCGCACAGCTGC | |
| | CGGGAGAAAAGAAGAACGGACTGTTCGGAAACCTGATCGCACTGAGCCTGGGACTGACACCGAACTTCAAGAGCAACTTCGACCTG | |
| | GCAGAAGACGCAAAGCTGCAGCTGAGCAAGGACACATACGACGACGACCTGGACAACCTGCTGGCACAGATCGGAGACCAGTACGC | |
| | AGACCTGTTCCTGGCAGCAAAGAACCTGAGCGACGCAATCCTGCTGAGCGACATCCTGAGAGTCAACACAGAAATCACAAAGGCAC | |
| | CGCTGAGCGCAAGCATGATCAAGAGATACGACGAACACCACCAGGACCTGACACTGCTGAAGGCACTGGTCAGACAGCAGCTGCCG | |
| | GAAAAGTACAAGGAAATCTTCTTCGACCAGAGCAAGAACGGATACGCAGGATACATCGACGGAGGAGCAAGCCAGGAAGAATTCTA | |
| | CAAGTTCATCAAGCCGATCCTGGAAAAGATGGACGGAACAGAAGAACTGCTGGTCAAGCTGAACAGAGAAGACCTGCTGAGAAAGC | |
| | AGAGAACATTCGACAACGGAAGCATCCCGCACCAGATCCACCTGGGAGAACTGCACGCAATCCTGAGAAGACAGGAAGACTTCTAC | |
| | CCGTTCCTGAAGGACAACAGAGAAAAGATCGAAAAGATCCTGACATTCAGAATCCCGTACTACGTCGGACCGCTGGCAAGAGGAAA | |
| | CAGCAGATTCGCATGGATGACAAGAAAGAGCGAAGAAACAATCACACCGTGGAACTTCGAAGAAGTCGTCGACAAGGGAGCAAGCG | |
| | CACAGAGCTTCATCGAAAGAATGACAAACTTCGACAAGAACCTGCCGAACGAAAAGGTCCTGCCGAAGCACAGCCTGCTGTACGAA | |
| | TACTTCACAGTCTACAACGAACTGACAAAGGTCAAGTACGTCACAGAAGGAATGAGAAAGCCGGCATTCCTGAGCGGAGAACAGAA | |
| | GAAGGCAATCGTCGACCTGCTGTTCAAGACAAACAGAAAGGTCACAGTCAAGCAGCTGAAGGAAGACTACTTCAAGAAGATCGAAT | |
| | GCTTCGACAGCGTCGAAATCAGCGGAGTCGAAGACAGATTCAACGCAAGCCTGGGAACATACCACGACCTGCTGAAGATCATCAAG | |
| | GACAAGGACTTCCTGGACAACGAAGAAAACGAAGACATCCTGGAAGACATCGTCCTGACACTGACACTGTTCGAAGACAGAGAAAT | |
| | GATCGAAGAAAGACTGAAGACATACGCACACCTGTTCGACGACAAGGTCATGAAGCAGCTGAAGAGAAGAAGATACACAGGATGGG | |
| | GAAGACTGAGCAGAAAGCTGATCAACGGAATCAGAGACAAGCAGAGCGGAAAGACAATCCTGGACTTCCTGAAGAGCGACGGATTC | |
| | GCAAACAGAAACTTCATGCAGCTGATCCACGACGACAGCCTGACATTCAAGGAAGACATCCAGAAGGCACAGGTCAGCGGACAGGG | |
| | AGACAGCCTGCACGAACACATCGCAAACCTGGCAGGAAGCCCGGCAATCAAGAAGGGAATCCTGCAGACAGTCAAGGTCGTCGACG | |
| | AACTGGTCAAGGTCATGGGAAGACACAAGCCGGAAAACATCGTCATCGAAATGGCAAGAGAAAACCAGACAACACAGAAGGGACAG | |
| | AAGAACAGCAGAGAAAGAATGAAGAGAATCGAAGAAGGAATCAAGGAACTGGGAAGCCAGATCCTGAAGGAACACCCGGTCGAAAA | |
| | CACACAGCTGCAGAACGAAAAGCTGTACCTGTACTACCTGCAGAACGGAAGAGACATGTACGTCGACCAGGAACTGGACATCAACA | |
| | GACTGAGCGACTACGACGTCGACCACATCGTCCCGCAGAGCTTCCTGAAGGACGACAGCATCGACAACAAGGTCCTGACAAGAAGC | |
| | GACAAGAACAGAGGAAAGAGCGACAACGTCCCGAGCGAAGAAGTCGTCAAGAAGATGAAGAACTACTGGAGACAGCTGCTGAACGC | |
| | AAAGCTGATCACACAGAGAAAGTTCGACAACCTGACAAAGGCAGAGAGAGGAGGACTGAGCGAACTGGACAAGGCAGGATTCATCA | |
| | AGAGACAGCTGGTCGAAACAAGACAGATCACAAAGCACGTCGCACAGATCCTGGACAGCAGAATGAACACAAAGTACGACGAAAAC | |
| | GACAAGCTGATCAGAGAAGTCAAGGTCATCACACTGAAGAGCAAGCTGGTCAGCGACTTCAGAAAGGACTTCCAGTTCTACAAGGT | |
| | CAGAGAAATCAACAACTACCACCACGCACACGACGCATACCTGAACGCAGTCGTCGGAACAGCACTGATCAAGAAGTACCCGAAGC | |
| | TGGAAAGCGAATTCGTCTACGGAGACTACAAGGTCTACGACGTCAGAAAGATGATCGCAAAGAGCGAACAGGAAATCGGAAAGGCA | |
| | ACAGCAAAGTACTTCTTCTACAGCAACATCATGAACTTCTTCAAGACAGAAATCACACTGGCAAACGGAGAAATCAGAAAGAGACC | |
| | GCTGATCGAAACAAACGGAGAAACAGGAGAAATCGTCTGGGACAAGGGAAGAGACTTCGCAACAGTCAGAAAGGTCCTGAGCATGC | |
| | CGCAGGTCAACATCGTCAAGAAGACAGAAGTCCAGACAGGAGGATTCAGCAAGGAAAGCATCCTGCCGAAGAGAAACAGCGACAAG | |
| | CTGATCGCAAGAAAGAAGGACTGGGACCCGAAGAAGTACGGAGGATTCGACAGCCCGACAGTCGCATACAGCGTCCTGGTCGTCGC | |
| | AAAGGTCGAAAAGGGAAAGAGCAAGAAGCTGAAGAGCGTCAAGGAACTGCTGGGAATCACAATCATGGAAAGAAGCAGCTTCGAAA | |
| | AGAACCCGATCGACTTCCTGGAAGCAAAGGGATACAAGGAAGTCAAGAAGGACCTGATCATCAAGCTGCCGAAGTACAGCCTGTTC | |
| | GAACTGGAAAACGGAAGAAAGAGAATGCTGGCAAGCGCAGGAGAACTGCAGAAGGGAAACGAACTGGCACTGCCGAGCAAGTACGT | |
| | CAACTTCCTGTACCTGGCAAGCCACTACGAAAAGCTGAAGGGAAGCCCGGAAGACAACGAACAGAAGCAGCTGTTCGTCGAACAGC | |
| | ACAAGCACTACCTGGACGAAATCATCGAACAGATCAGCGAATTCAGCAAGAGAGTCATCCTGGCAGACGCAAACCTGGACAAGGTC | |
| | CTGAGCGCATACAACAAGCACAGAGACAAGCCGATCAGAGAACAGGCAGAAAACATCATCCACCTGTTCACACTGACAAACCTGGG | |
| | AGCACCGGCAGCATTCAAGTACTTCGACACAACAATCGACAGAAAGAGATACACAAGCACAAAGGAAGTCCTGGACGCAACACTGA | |
| | TCCACCAGAGCATCACAGGACTGTACGAAACAAGAATCGACCTGAGCCAGCTGGGAGGAGACGGAGGAGGAAGCGCAGCAGCAAAG | |
| | AGAGTCTGGAGCATGGCATTCTAG | |
| Open reading | ATGGACAAGAAGTACAGCATCGGACTGGACATCGGAACAAACAGCGTCGGATGGGCAGTCATCACAGACGAATACAAGGTCCCGAG | 337 |
| frame for | CAAGAAGTTCAAGGTCCTGGGAAACACAGACAGACACAGCATCAAGAAGAACCTGATCGGAGCACTGCTGTTCGACAGCGGAGAAA | |
| Cas9 with | CAGCAGAAGCAACAAGACTGAAGAGAACAGCAAGAAGAAGATACACAAGAAGAAAGAACAGAATCTGCTACCTGCAGGAAATCTTC | |
| NLS 8, with | AGCAACGAAATGGCAAAGGTCGACGACAGCTTCTTCCACAGACTGGAAGAAAGCTTCCTGGTCGAAGAAGACAAGAAGCACGAAAG | |
| start and | ACACCCGATCTTCGGAAACATCGTCGACGAAGTCGCATACCACGAAAAGTACCCGACAATCTACCACCTGAGAAAGAAGCTGGTCG | |
| stop codons | ACAGCACAGACAAGGCAGACCTGAGACTGATCTACCTGGCACTGGCACACATGATCAAGTTCAGAGGACACTTCCTGATCGAAGGA | |
| | GACCTGAACCCGGACAACAGCGACGTCGACAAGCTGTTCATCCAGCTGGTCCAGACATACAACCAGCTGTTCGAAGAAAACCCGAT | |
| | CAACGCAAGCGGAGTCGACGCAAAGGCAATCCTGAGCGCAAGACTGAGCAAGAGCAGAAGACTGGAAAACCTGATCGCACAGCTGC | |
| | CGGGAGAAAAGAAGAACGGACTGTTCGGAAACCTGATCGCACTGAGCCTGGGACTGACACCGAACTTCAAGAGCAACTTCGACCTG | |
| | GCAGAAGACGCAAAGCTGCAGCTGAGCAAGGACACATACGACGACGACCTGGACAACCTGCTGGCACAGATCGGAGACCAGTACGC | |
| | AGACCTGTTCCTGGCAGCAAAGAACCTGAGCGACGCAATCCTGCTGAGCGACATCCTGAGAGTCAACACAGAAATCACAAAGGCAC | |
| | CGCTGAGCGCAAGCATGATCAAGAGATACGACGAACACCACCAGGACCTGACACTGCTGAAGGCACTGGTCAGACAGCAGCTGCCG | |
| | GAAAAGTACAAGGAAATCTTCTTCGACCAGAGCAAGAACGGATACGCAGGATACATCGACGGAGGAGCAAGCCAGGAAGAATTCTA | |
| | CAAGTTCATCAAGCCGATCCTGGAAAAGATGGACGGAACAGAAGAACTGCTGGTCAAGCTGAACAGAGAAGACCTGCTGAGAAAGC | |
| | AGAGAACATTCGACAACGGAAGCATCCCGCACCAGATCCACCTGGGAGAACTGCACGCAATCCTGAGAAGACAGGAAGACTTCTAC | |
| | CCGTTCCTGAAGGACAACAGAGAAAAGATCGAAAAGATCCTGACATTCAGAATCCCGTACTACGTCGGACCGCTGGCAAGAGGAAA | |
| | CAGCAGATTCGCATGGATGACAAGAAAGAGCGAAGAAACAATCACACCGTGGAACTTCGAAGAAGTCGTCGACAAGGGAGCAAGCG | |
| | CACAGAGCTTCATCGAAAGAATGACAAACTTCGACAAGAACCTGCCGAACGAAAAGGTCCTGCCGAAGCACAGCCTGCTGTACGAA | |
| | TACTTCACAGTCTACAACGAACTGACAAAGGTCAAGTACGTCACAGAAGGAATGAGAAAGCCGGCATTCCTGAGCGGAGAACAGAA | |
| | GAAGGCAATCGTCGACCTGCTGTTCAAGACAAACAGAAAGGTCACAGTCAAGCAGCTGAAGGAAGACTACTTCAAGAAGATCGAAT | |
| | GCTTCGACAGCGTCGAAATCAGCGGAGTCGAAGACAGATTCAACGCAAGCCTGGGAACATACCACGACCTGCTGAAGATCATCAAG | |
| | GACAAGGACTTCCTGGACAACGAAGAAAACGAAGACATCCTGGAAGACATCGTCCTGACACTGACACTGTTCGAAGACAGAGAAAT | |
| | GATCGAAGAAAGACTGAAGACATACGCACACCTGTTCGACGACAAGGTCATGAAGCAGCTGAAGAGAAGAAGATACACAGGATGGG | |
| | GAAGACTGAGCAGAAAGCTGATCAACGGAATCAGAGACAAGCAGAGCGGAAAGACAATCCTGGACTTCCTGAAGAGCGACGGATTC | |
| | GCAAACAGAAACTTCATGCAGCTGATCCACGACGACAGCCTGACATTCAAGGAAGACATCCAGAAGGCACAGGTCAGCGGACAGGG | |
| | AGACAGCCTGCACGAACACATCGCAAACCTGGCAGGAAGCCCGGCAATCAAGAAGGGAATCCTGCAGACAGTCAAGGTCGTCGACG | |
| | AACTGGTCAAGGTCATGGGAAGACACAAGCCGGAAAACATCGTCATCGAAATGGCAAGAGAAAACCAGACAACACAGAAGGGACAG | |
| | AAGAACAGCAGAGAAAGAATGAAGAGAATCGAAGAAGGAATCAAGGAACTGGGAAGCCAGATCCTGAAGGAACACCCGGTCGAAAA | |
| | CACACAGCTGCAGAACGAAAAGCTGTACCTGTACTACCTGCAGAACGGAAGAGACATGTACGTCGACCAGGAACTGGACATCAACA | |
| | GACTGAGCGACTACGACGTCGACCACATCGTCCCGCAGAGCTTCCTGAAGGACGACAGCATCGACAACAAGGTCCTGACAAGAAGC | |
| | GACAAGAACAGAGGAAAGAGCGACAACGTCCCGAGCGAAGAAGTCGTCAAGAAGATGAAGAACTACTGGAGACAGCTGCTGAACGC | |
| | AAAGCTGATCACACAGAGAAAGTTCGACAACCTGACAAAGGCAGAGAGAGGAGGACTGAGCGAACTGGACAAGGCAGGATTCATCA | |
| | AGAGACAGCTGGTCGAAACAAGACAGATCACAAAGCACGTCGCACAGATCCTGGACAGCAGAATGAACACAAAGTACGACGAAAAC | |
| | GACAAGCTGATCAGAGAAGTCAAGGTCATCACACTGAAGAGCAAGCTGGTCAGCGACTTCAGAAAGGACTTCCAGTTCTACAAGGT | |
| | CAGAGAAATCAACAACTACCACCACGCACACGACGCATACCTGAACGCAGTCGTCGGAACAGCACTGATCAAGAAGTACCCGAAGC | |
| | TGGAAAGCGAATTCGTCTACGGAGACTACAAGGTCTACGACGTCAGAAAGATGATCGCAAAGAGCGAACAGGAAATCGGAAAGGCA | |
| | ACAGCAAAGTACTTCTTCTACAGCAACATCATGAACTTCTTCAAGACAGAAATCACACTGGCAAACGGAGAAATCAGAAAGAGACC | |
| | GCTGATCGAAACAAACGGAGAAACAGGAGAAATCGTCTGGGACAAGGGAAGAGACTTCGCAACAGTCAGAAAGGTCCTGAGCATGC | |
| | CGCAGGTCAACATCGTCAAGAAGACAGAAGTCCAGACAGGAGGATTCAGCAAGGAAAGCATCCTGCCGAAGAGAAACAGCGACAAG | |
| | CTGATCGCAAGAAAGAAGGACTGGGACCCGAAGAAGTACGGAGGATTCGACAGCCCGACAGTCGCATACAGCGTCCTGGTCGTCGC | |
| | AAAGGTCGAAAAGGGAAAGAGCAAGAAGCTGAAGAGCGTCAAGGAACTGCTGGGAATCACAATCATGGAAAGAAGCAGCTTCGAAA | |
| | AGAACCCGATCGACTTCCTGGAAGCAAAGGGATACAAGGAAGTCAAGAAGGACCTGATCATCAAGCTGCCGAAGTACAGCCTGTTC | |
| | GAACTGGAAAACGGAAGAAAGAGAATGCTGGCAAGCGCAGGAGAACTGCAGAAGGGAAACGAACTGGCACTGCCGAGCAAGTACGT | |
| | CAACTTCCTGTACCTGGCAAGCCACTACGAAAAGCTGAAGGGAAGCCCGGAAGACAACGAACAGAAGCAGCTGTTCGTCGAACAGC | |
| | ACAAGCACTACCTGGACGAAATCATCGAACAGATCAGCGAATTCAGCAAGAGAGTCATCCTGGCAGACGCAAACCTGGACAAGGTC | |
| | CTGAGCGCATACAACAAGCACAGAGACAAGCCGATCAGAGAACAGGCAGAAAACATCATCCACCTGTTCACACTGACAAACCTGGG | |
| | AGCACCGGCAGCATTCAAGTACTTCGACACAACAATCGACAGAAAGAGATACACAAGCACAAAGGAAGTCCTGGACGCAACACTGA | |
| | TCCACCAGAGCATCACAGGACTGTACGAAACAAGAATCGACCTGAGCCAGCTGGGAGGAGACGGAGGAGGAAGCGCAGCAGCAAAG | |
| | AGAAGCTGGAGCATGGCATTCTAG | |
| Open reading | ATGGACAAGAAGTACAGCATCGGACTGGACATCGGAACAAACAGCGTCGGATGGGCAGTCATCACAGACGAATACAAGGTCCCGAG | 338 |
| frame for | CAAGAAGTTCAAGGTCCTGGGAAACACAGACAGACACAGCATCAAGAAGAACCTGATCGGAGCACTGCTGTTCGACAGCGGAGAAA | |
| Cas9 with | CAGCAGAAGCAACAAGACTGAAGAGAACAGCAAGAAGAAGATACACAAGAAGAAAGAACAGAATCTGCTACCTGCAGGAAATCTTC | |
| NLS9, with | AGCAACGAAATGGCAAAGGTCGACGACAGCTTCTTCCACAGACTGGAAGAAAGCTTCCTGGTCGAAGAAGACAAGAAGCACGAAAG | |
| start and | ACACCCGATCTTCGGAAACATCGTCGACGAAGTCGCATACCACGAAAAGTACCCGACAATCTACCACCTGAGAAAGAAGCTGGTCG | |
| stop codons | ACAGCACAGACAAGGCAGACCTGAGACTGATCTACCTGGCACTGGCACACATGATCAAGTTCAGAGGACACTTCCTGATCGAAGGA | |
| | GACCTGAACCCGGACAACAGCGACGTCGACAAGCTGTTCATCCAGCTGGTCCAGACATACAACCAGCTGTTCGAAGAAAACCCGAT | |
| | CAACGCAAGCGGAGTCGACGCAAAGGCAATCCTGAGCGCAAGACTGAGCAAGAGCAGAAGACTGGAAAACCTGATCGCACAGCTGC | |
| | CGGGAGAAAAGAAGAACGGACTGTTCGGAAACCTGATCGCACTGAGCCTGGGACTGACACCGAACTTCAAGAGCAACTTCGACCTG | |
| | GCAGAAGACGCAAAGCTGCAGCTGAGCAAGGACACATACGACGACGACCTGGACAACCTGCTGGCACAGATCGGAGACCAGTACGC | |
| | AGACCTGTTCCTGGCAGCAAAGAACCTGAGCGACGCAATCCTGCTGAGCGACATCCTGAGAGTCAACACAGAAATCACAAAGGCAC | |
| | CGCTGAGCGCAAGCATGATCAAGAGATACGACGAACACCACCAGGACCTGACACTGCTGAAGGCACTGGTCAGACAGCAGCTGCCG | |
| | GAAAAGTACAAGGAAATCTTCTTCGACCAGAGCAAGAACGGATACGCAGGATACATCGACGGAGGAGCAAGCCAGGAAGAATTCTA | |
| | CAAGTTCATCAAGCCGATCCTGGAAAAGATGGACGGAACAGAAGAACTGCTGGTCAAGCTGAACAGAGAAGACCTGCTGAGAAAGC | |
| | AGAGAACATTCGACAACGGAAGCATCCCGCACCAGATCCACCTGGGAGAACTGCACGCAATCCTGAGAAGACAGGAAGACTTCTAC | |
| | CCGTTCCTGAAGGACAACAGAGAAAAGATCGAAAAGATCCTGACATTCAGAATCCCGTACTACGTCGGACCGCTGGCAAGAGGAAA | |
| | CAGCAGATTCGCATGGATGACAAGAAAGAGCGAAGAAACAATCACACCGTGGAACTTCGAAGAAGTCGTCGACAAGGGAGCAAGCG | |
| | CACAGAGCTTCATCGAAAGAATGACAAACTTCGACAAGAACCTGCCGAACGAAAAGGTCCTGCCGAAGCACAGCCTGCTGTACGAA | |
| | TACTTCACAGTCTACAACGAACTGACAAAGGTCAAGTACGTCACAGAAGGAATGAGAAAGCCGGCATTCCTGAGCGGAGAACAGAA | |
| | GAAGGCAATCGTCGACCTGCTGTTCAAGACAAACAGAAAGGTCACAGTCAAGCAGCTGAAGGAAGACTACTTCAAGAAGATCGAAT | |
| | GCTTCGACAGCGTCGAAATCAGCGGAGTCGAAGACAGATTCAACGCAAGCCTGGGAACATACCACGACCTGCTGAAGATCATCAAG | |
| | GACAAGGACTTCCTGGACAACGAAGAAAACGAAGACATCCTGGAAGACATCGTCCTGACACTGACACTGTTCGAAGACAGAGAAAT | |
| | GATCGAAGAAAGACTGAAGACATACGCACACCTGTTCGACGACAAGGTCATGAAGCAGCTGAAGAGAAGAAGATACACAGGATGGG | |
| | GAAGACTGAGCAGAAAGCTGATCAACGGAATCAGAGACAAGCAGAGCGGAAAGACAATCCTGGACTTCCTGAAGAGCGACGGATTC | |
| | GCAAACAGAAACTTCATGCAGCTGATCCACGACGACAGCCTGACATTCAAGGAAGACATCCAGAAGGCACAGGTCAGCGGACAGGG | |
| | AGACAGCCTGCACGAACACATCGCAAACCTGGCAGGAAGCCCGGCAATCAAGAAGGGAATCCTGCAGACAGTCAAGGTCGTCGACG | |
| | AACTGGTCAAGGTCATGGGAAGACACAAGCCGGAAAACATCGTCATCGAAATGGCAAGAGAAAACCAGACAACACAGAAGGGACAG | |
| | AAGAACAGCAGAGAAAGAATGAAGAGAATCG+AGAAGGAATCAAGGAACTGGGAAGCCAGATCCTGAAGGAACACCCGGTCGAAAA | |
| | CACACAGCTGCAGAACGAAAAGCTGTACCTGTACTACCTGCAGAACGGAAGAGACATGTACGTCGACCAGGAACTGGACATCAACA | |
| | GACTGAGCGACTACGACGTCGACCACATCGTCCCGCAGAGCTTCCTGAAGGACGACAGCATCGACAACAAGGTCCTGACAAGAAGC | |
| | GACAAGAACAGAGGAAAGAGCGACAACGTCCCGAGCGAAGAAGTCGTCAAGAAGATGAAGAACTACTGGAGACAGCTGCTGAACGC | |
| | AAAGCTGATCACACAGAGAAAGTTCGACAACCTGACAAAGGCAGAGAGAGGAGGACTGAGCGAACTGGACAAGGCAGGATTCATCA | |
| | AGAGACAGCTGGTCGAAACAAGACAGATCACAAAGCACGTCGCACAGATCCTGGACAGCAGAATGAACACAAAGTACGACGAAAAC | |
| | GACAAGCTGATCAGAGAAGTCAAGGTCATCACACTGAAGAGCAAGCTGGTCAGCGACTTCAGAAAGGACTTCCAGTTCTACAAGGT | |
| | CAGAGAAATCAACAACTACCACCACGCACACGACGCATACCTGAACGCAGTCGTCGGAACAGCACTGATCAAGAAGTACCCGAAGC | |
| | TGGAAAGCGAATTCGTCTACGGAGACTACAAGGTCTACGACGTCAGAAAGATGATCGCAAAGAGCGAACAGGAAATCGGAAAGGCA | |
| | ACAGCAAAGTACTTCTTCTACAGCAACATCATGAACTTCTTCAAGACAGAAATCACACTGGCAAACGGAGAAATCAGAAAGAGACC | |
| | GCTGATCGAAACAAACGGAGAAACAGGAGAAATCGTCTGGGACAAGGGAAGAGACTTCGCAACAGTCAGAAAGGTCCTGAGCATGC | |
| | CGCAGGTCAACATCGTCAAGAAGACAGAAGTCCAGACAGGAGGATTCAGCAAGGAAAGCATCCTGCCGAAGAGAAACAGCGACAAG | |
| | CTGATCGCAAGAAAGAAGGACTGGGACCCGAAGAAGTACGGAGGATTCGACAGCCCGACAGTCGCATACAGCGTCCTGGTCGTCGC | |
| | AAAGGTCGAAAAGGGAAAGAGCAAGAAGCTGAAGAGCGTCAAGGAACTGCTGGGAATCACAATCATGGAAAGAAGCAGCTTCGAAA | |
| | AGAACCCGATCGACTTCCTGGAAGCAAAGGGATACAAGGAAGTCAAGAAGGACCTGATCATCAAGCTGCCGAAGTACAGCCTGTTC | |
| | GAACTGGAAAACGGAAGAAAGAGAATGCTGGCAAGCGCAGGAGAACTGCAGAAGGGAAACGAACTGGCACTGCCGAGCAAGTACGT | |
| | CAACTTCCTGTACCTGGCAAGCCACTACGAAAAGCTGAAGGGAAGCCCGGAAGACAACGAACAGAAGCAGCTGTTCGTCGAACAGC | |
| | ACAAGCACTACCTGGACGAAATCATCGAACAGATCAGCGAATTCAGCAAGAGAGTCATCCTGGCAGACGCAAACCTGGACAAGGTC | |
| | CTGAGCGCATACAACAAGCACAGAGACAAGCCGATCAGAGAACAGGCAGAAAACATCATCCACCTGTTCACACTGACAAACCTGGG | |
| | AGCACCGGCAGCATTCAAGTACTTCGACACAACAATCGACAGAAAGAGATACACAAGCACAAAGGAAGTCCTGGACGCAACACTGA | |
| | TCCACCAGAGCATCACAGGACTGTACGAAACAAGAATCGACCTGAGCCAGCTGGGAGGAGACGGAGGAGGAAGCGCAGCAGCAAAG | |
| | AGAAAGTACTTCGCAGCATAG | |
| Open reading | ATGGACAAGAAGTACAGCATCGGACTGGACATCGGAACAAACAGCGTCGGATGGGCAGTCATCACAGACGAATACAAGGTCCCGAG | 339 |
| frame for | CAAGAAGTTCAAGGTCCTGGGAAACACAGACAGACACAGCATCAAGAAGAACCTGATCGGAGCACTGCTGTTCGACAGCGGAGAAA | |
| Cas9 with | CAGCAGAAGCAACAAGACTGAAGAGAACAGCAAGAAGAAGATACACAAGAAGAAAGAACAGAATCTGCTACCTGCAGGAAATCTTC | |
| NLS10, with | AGCAACGAAATGGCAAAGGTCGACGACAGCTTCTTCCACAGACTGGAAGAAAGCTTCCTGGTCGAAGAAGACAAGAAGCACGAAAG | |
| start and | ACACCCGATCTTCGGAAACATCGTCGACGAAGTCGCATACCACGAAAAGTACCCGACAATCTACCACCTGAGAAAGAAGCTGGTCG | |
| stop codons | ACAGCACAGACAAGGCAGACCTGAGACTGATCTACCTGGCACTGGCACACATGATCAAGTTCAGAGGACACTTCCTGATCGAAGGA | |
| | GACCTGAACCCGGACAACAGCGACGTCGACAAGCTGTTCATCCAGCTGGTCCAGACATACAACCAGCTGTTCGAAGAAAACCCGAT | |
| | CAACGCAAGCGGAGTCGACGCAAAGGCAATCCTGAGCGCAAGACTGAGCAAGAGCAGAAGACTGGAAAACCTGATCGCACAGCTGC | |
| | CGGGAGAAAAGAAGAACGGACTGTTCGGAAACCTGATCGCACTGAGCCTGGGACTGACACCGAACTTCAAGAGCAACTTCGACCTG | |
| | GCAGAAGACGCAAAGCTGCAGCTGAGCAAGGACACATACGACGACGACCTGGACAACCTGCTGGCACAGATCGGAGACCAGTACGC | |
| | AGACCTGTTCCTGGCAGCAAAGAACCTGAGCGACGCAATCCTGCTGAGCGACATCCTGAGAGTCAACACAGAAATCACAAAGGCAC | |
| | CGCTGAGCGCAAGCATGATCAAGAGATACGACGAACACCACCAGGACCTGACACTGCTGAAGGCACTGGTCAGACAGCAGCTGCCG | |
| | GAAAAGTACAAGGAAATCTTCTTCGACCAGAGCAAGAACGGATACGCAGGATACATCGACGGAGGAGCAAGCCAGGAAGAATTCTA | |
| | CAAGTTCATCAAGCCGATCCTGGAAAAGATGGACGGAACAGAAGAACTGCTGGTCAAGCTGAACAGAGAAGACCTGCTGAGAAAGC | |
| | AGAGAACATTCGACAACGGAAGCATCCCGCACCAGATCCACCTGGGAGAACTGCACGCAATCCTGAGAAGACAGGAAGACTTCTAC | |
| | CCGTTCCTGAAGGACAACAGAGAAAAGATCGAAAAGATCCTGACATTCAGAATCCCGTACTACGTCGGACCGCTGGCAAGAGGAAA | |
| | CAGCAGATTCGCATGGATGACAAGAAAGAGCGAAGAAACAATCACACCGTGGAACTTCGAAGAAGTCGTCGACAAGGGAGCAAGCG | |
| | CACAGAGCTTCATCGAAAGAATGACAAACTTCGACAAGAACCTGCCGAACGAAAAGGTCCTGCCGAAGCACAGCCTGCTGTACGAA | |
| | TACTTCACAGTCTACAACGAACTGACAAAGGTCAAGTACGTCACAGAAGGAATGAGAAAGCCGGCATTCCTGAGCGGAGAACAGAA | |
| | GAAGGCAATCGTCGACCTGCTGTTCAAGACAAACAGAAAGGTCACAGTCAAGCAGCTGAAGGAAGACTACTTCAAGAAGATCGAAT | |
| | GCTTCGACAGCGTCGAAATCAGCGGAGTCGAAGACAGATTCAACGCAAGCCTGGGAACATACCACGACCTGCTGAAGATCATCAAG | |
| | GACAAGGACTTCCTGGACAACGAAGAAAACGAAGACATCCTGGAAGACATCGTCCTGACACTGACACTGTTCGAAGACAGAGAAAT | |
| | GATCGAAGAAAGACTGAAGACATACGCACACCTGTTCGACGACAAGGTCATGAAGCAGCTGAAGAGAAGAAGATACACAGGATGGG | |
| | GAAGACTGAGCAGAAAGCTGATCAACGGAATCAGAGACAAGCAGAGCGGAAAGACAATCCTGGACTTCCTGAAGAGCGACGGATTC | |
| | GCAAACAGAAACTTCATGCAGCTGATCCACGACGACAGCCTGACATTCAAGGAAGACATCCAGAAGGCACAGGTCAGCGGACAGGG | |
| | AGACAGCCTGCACGAACACATCGCAAACCTGGCAGGAAGCCCGGCAATCAAGAAGGGAATCCTGCAGACAGTCAAGGTCGTCGACG | |
| | AACTGGTCAAGGTCATGGGAAGACACAAGCCGGAAAACATCGTCATCGAAATGGCAAGAGAAAACCAGACAACACAGAAGGGACAG | |
| | AAGAACAGCAGAGAAAGAATGAAGAGAATCGAAGAAGGAATCAAGGAACTGGGAAGCCAGATCCTGAAGGAACACCCGGTCGAAAA | |
| | CACACAGCTGCAGAACGAAAAGCTGTACCTGTACTACCTGCAGAACGGAAGAGACATGTACGTCGACCAGGAACTGGACATCAACA | |
| | GACTGAGCGACTACGACGTCGACCACATCGTCCCGCAGAGCTTCCTGAAGGACGACAGCATCGACAACAAGGTCCTGACAAGAAGC | |
| | GACAAGAACAGAGGAAAGAGCGACAACGTCCCGAGCGAAGAAGTCGTCAAGAAGATGAAGAACTACTGGAGACAGCTGCTGAACGC | |
| | AAAGCTGATCACACAGAGAAAGTTCGACAACCTGACAAAGGCAGAGAGAGGAGGACTGAGCGAACTGGACAAGGCAGGATTCATCA | |
| | AGAGACAGCTGGTCGAAACAAGACAGATCACAAAGCACGTCGCACAGATCCTGGACAGCAGAATGAACACAAAGTACGACGAAAAC | |
| | GACAAGCTGATCAGAGAAGTCAAGGTCATCACACTGAAGAGCAAGCTGGTCAGCGACTTCAGAAAGGACTTCCAGTTCTACAAGGT | |
| | CAGAGAAATCAACAACTACCACCACGCACACGACGCATACCTGAACGCAGTCGTCGGAACAGCACTGATCAAGAAGTACCCGAAGC | |
| | TGGAAAGCGAATTCGTCTACGGAGACTACAAGGTCTACGACGTCAGAAAGATGATCGCAAAGAGCGAACAGGAAATCGGAAAGGCA | |
| | ACAGCAAAGTACTTCTTCTACAGCAACATCATGAACTTCTTCAAGACAGAAATCACACTGGCAAACGGAGAAATCAGAAAGAGACC | |
| | GCTGATCGAAACAAACGGAGAAACAGGAGAAATCGTCTGGGACAAGGGAAGAGACTTCGCAACAGTCAGAAAGGTCCTGAGCATGC | |
| | CGCAGGTCAACATCGTCAAGAAGACAGAAGTCCAGACAGGAGGATTCAGCAAGGAAAGCATCCTGCCGAAGAGAAACAGCGACAAG | |
| | CTGATCGCAAGAAAGAAGGACTGGGACCCGAAGAAGTACGGAGGATTCGACAGCCCGACAGTCGCATACAGCGTCCTGGTCGTCGC | |
| | AAAGGTCGAAAAGGGAAAGAGCAAGAAGCTGAAGAGCGTCAAGGAACTGCTGGGAATCACAATCATGGAAAGAAGCAGCTTCGAAA | |
| | AGAACCCGATCGACTTCCTGGAAGCAAAGGGATACAAGGAAGTCAAGAAGGACCTGATCATCAAGCTGCCGAAGTACAGCCTGTTC | |
| | GAACTGGAAAACGGAAGAAAGAGAATGCTGGCAAGCGCAGGAGAACTGCAGAAGGGAAACGAACTGGCACTGCCGAGCAAGTACGT | |
| | CAACTTCCTGTACCTGGCAAGCCACTACGAAAAGCTGAAGGGAAGCCCGGAAGACAACGAACAGAAGCAGCTGTTCGTCGAACAGC | |
| | ACAAGCACTACCTGGACGAAATCATCGAACAGATCAGCGAATTCAGCAAGAGAGTCATCCTGGCAGACGCAAACCTGGACAAGGTC | |
| | CTGAGCGCATACAACAAGCACAGAGACAAGCCGATCAGAGAACAGGCAGAAAACATCATCCACCTGTTCACACTGACAAACCTGGG | |
| | AGCACCGGCAGCATTCAAGTACTTCGACACAACAATCGACAGAAAGAGATACACAAGCACAAAGGAAGTCCTGGACGCAACACTGA | |
| | TCCACCAGAGCATCACAGGACTGTACGAAACAAGAATCGACCTGAGCCAGCTGGGAGGAGACGGAGGAGGAAGCAGAGCAGCAAAG | |
| | AGAAAGGCATTCGCAGCATAG | |
| Open reading | ATGGACAAGAAGTACAGCATCGGACTGGACATCGGAACAAACAGCGTCGGATGGGCAGTCATCACAGACGAATACAAGGTCCCGAG | 340 |
| frame for | CAAGAAGTTCAAGGTCCTGGGAAACACAGACAGACACAGCATCAAGAAGAACCTGATCGGAGCACTGCTGTTCGACAGCGGAGAAA | |
| Cas9 with | CAGCAGAAGCAACAAGACTGAAGAGAACAGCAAGAAGAAGATACACAAGAAGAAAGAACAGAATCTGCTACCTGCAGGAAATCTTC | |
| NLS11, with | AGCAACGAAATGGCAAAGGTCGACGACAGCTTCTTCCACAGACTGGAAGAAAGCTTCCTGGTCGAAGAAGACAAGAAGCACGAAAG | |
| start and | ACACCCGATCTTCGGAAACATCGTCGACGAAGTCGCATACCACGAAAAGTACCCGACAATCTACCACCTGAGAAAGAAGCTGGTCG | |
| stop codons | ACAGCACAGACAAGGCAGACCTGAGACTGATCTACCTGGCACTGGCACACATGATCAAGTTCAGAGGACACTTCCTGATCGAAGGA | |
| | GACCTGAACCCGGACAACAGCGACGTCGACAAGCTGTTCATCCAGCTGGTCCAGACATACAACCAGCTGTTCGAAGAAAACCCGAT | |
| | CAACGCAAGCGGAGTCGACGCAAAGGCAATCCTGAGCGCAAGACTGAGCAAGAGCAGAAGACTGGAAAACCTGATCGCACAGCTGC | |
| | CGGGAGAAAAGAAGAACGGACTGTTCGGAAACCTGATCGCACTGAGCCTGGGACTGACACCGAACTTCAAGAGCAACTTCGACCTG | |
| | GCAGAAGACGCAAAGCTGCAGCTGAGCAAGGACACATACGACGACGACCTGGACAACCTGCTGGCACAGATCGGAGACCAGTACGC | |
| | AGACCTGTTCCTGGCAGCAAAGAACCTGAGCGACGCAATCCTGCTGAGCGACATCCTGAGAGTCAACACAGAAATCACAAAGGCAC | |
| | CGCTGAGCGCAAGCATGATCAAGAGATACGACGAACACCACCAGGACCTGACACTGCTGAAGGCACTGGTCAGACAGCAGCTGCCG | |
| | GAAAAGTACAAGGAAATCTTCTTCGACCAGAGCAAGAACGGATACGCAGGATACATCGACGGAGGAGCAAGCCAGGAAGAATTCTA | |
| | CAAGTTCATCAAGCCGATCCTGGAAAAGATGGACGGAACAGAAGAACTGCTGGTCAAGCTGAACAGAGAAGACCTGCTGAGAAAGC | |
| | AGAGAACATTCGACAACGGAAGCATCCCGCACCAGATCCACCTGGGAGAACTGCACGCAATCCTGAGAAGACAGGAAGACTTCTAC | |
| | CCGTTCCTGAAGGACAACAGAGAAAAGATCGAAAAGATCCTGACATTCAGAATCCCGTACTACGTCGGACCGCTGGCAAGAGGAAA | |
| | CAGCAGATTCGCATGGATGACAAGAAAGAGCGAAGAAACAATCACACCGTGGAACTTCGAAGAAGTCGTCGACAAGGGAGCAAGCG | |
| | CACAGAGCTTCATCGAAAGAATGACAAACTTCGACAAGAACCTGCCGAACGAAAAGGTCCTGCCGAAGCACAGCCTGCTGTACGAA | |
| | TACTTCACAGTCTACAACGAACTGACAAAGGTCAAGTACGTCACAGAAGGAATGAGAAAGCCGGCATTCCTGAGCGGAGAACAGAA | |
| | GAAGGCAATCGTCGACCTGCTGTTCAAGACAAACAGAAAGGTCACAGTCAAGCAGCTGAAGGAAGACTACTTCAAGAAGATCGAAT | |
| | GCTTCGACAGCGTCGAAATCAGCGGAGTCGAAGACAGATTCAACGCAAGCCTGGGAACATACCACGACCTGCTGAAGATCATCAAG | |
| | GACAAGGACTTCCTGGACAACGAAGAAAACGAAGACATCCTGGAAGACATCGTCCTGACACTGACACTGTTCGAAGACAGAGAAAT | |
| | GATCGAAGAAAGACTGAAGACATACGCACACCTGTTCGACGACAAGGTCATGAAGCAGCTGAAGAGAAGAAGATACACAGGATGGG | |
| | GAAGACTGAGCAGAAAGCTGATCAACGGAATCAGAGACAAGCAGAGCGGAAAGACAATCCTGGACTTCCTGAAGAGCGACGGATTC | |
| | GCAAACAGAAACTTCATGCAGCTGATCCACGACGACAGCCTGACATTCAAGGAAGACATCCAGAAGGCACAGGTCAGCGGACAGGG | |
| | AGACAGCCTGCACGAACACATCGCAAACCTGGCAGGAAGCCCGGCAATCAAGAAGGGAATCCTGCAGACAGTCAAGGTCGTCGACG | |
| | AACTGGTCAAGGTCATGGGAAGACACAAGCCGGAAAACATCGTCATCGAAATGGCAAGAGAAAACCAGACAACACAGAAGGGACAG | |
| | AAGAACAGCAGAGAAAGAATGAAGAGAATCGAAGAAGGAATCAAGGAACTGGGAAGCCAGATCCTGAAGGAACACCCGGTCGAAAA | |
| | CACACAGCTGCAGAACGAAAAGCTGTACCTGTACTACCTGCAGAACGGAAGAGACATGTACGTCGACCAGGAACTGGACATCAACA | |
| | GACTGAGCGACTACGACGTCGACCACATCGTCCCGCAGAGCTTCCTGAAGGACGACAGCATCGACAACAAGGTCCTGACAAGAAGC | |
| | GACAAGAACAGAGGAAAGAGCGACAACGTCCCGAGCGAAGAAGTCGTCAAGAAGATGAAGAACTACTGGAGACAGCTGCTGAACGC | |
| | AAAGCTGATCACACAGAGAAAGTTCGACAACCTGACAAAGGCAGAGAGAGGAGGACTGAGCGAACTGGACAAGGCAGGATTCATCA | |
| | AGAGACAGCTGGTCGAAACAAGACAGATCACAAAGCACGTCGCACAGATCCTGGACAGCAGAATGAACACAAAGTACGACGAAAAC | |
| | GACAAGCTGATCAGAGAAGTCAAGGTCATCACACTGAAGAGCAAGCTGGTCAGCGACTTCAGAAAGGACTTCCAGTTCTACAAGGT | |
| | CAGAGAAATCAACAACTACCACCACGCACACGACGCATACCTGAACGCAGTCGTCGGAACAGCACTGATCAAGAAGTACCCGAAGC | |
| | TGGAAAGCGAATTCGTCTACGGAGACTACAAGGTCTACGACGTCAGAAAGATGATCGCAAAGAGCGAACAGGAAATCGGAAAGGCA | |
| | ACAGCAAAGTACTTCTTCTACAGCAACATCATGAACTTCTTCAAGACAGAAATCACACTGGCAAACGGAGAAATCAGAAAGAGACC | |
| | GCTGATCGAAACAAACGGAGAAACAGGAGAAATCGTCTGGGACAAGGGAAGAGACTTCGCAACAGTCAGAAAGGTCCTGAGCATGC | |
| | CGCAGGTCAACATCGTCAAGAAGACAGAAGTCCAGACAGGAGGATTCAGCAAGGAAAGCATCCTGCCGAAGAGAAACAGCGACAAG | |
| | CTGATCGCAAGAAAGAAGGACTGGGACCCGAAGAAGTACGGAGGATTCGACAGCCCGACAGTCGCATACAGCGTCCTGGTCGTCGC | |
| | AAAGGTCGAAAAGGGAAAGAGCAAGAAGCTGAAGAGCGTCAAGGAACTGCTGGGAATCACAATCATGGAAAGAAGCAGCTTCGAAA | |
| | AGAACCCGATCGACTTCCTGGAAGCAAAGGGATACAAGGAAGTCAAGAAGGACCTGATCATCAAGCTGCCGAAGTACAGCCTGTTC | |
| | GAACTGGAAAACGGAAGPAAGAGAATGCTGGCAAGCGCAGGAGAACTGCAGAAGGGAAACGAACTGGCACTGCCGAGCAAGTACGT | |
| | CAACTTCCTGTACCTGGCAAGCCACTACGAAAAGCTGAAGGGAAGCCCGGAAGACAACGAACAGAAGCAGCTGTTCGTCGAACAGC | |
| | ACAAGCACTACCTGGACGAAATCATCGAACAGATCAGCGAATTCAGCAAGAGAGTCATCCTGGCAGACGCAAACCTGGACAAGGTC | |
| | CTGAGCGCATACAACAAGCACAGAGACAAGCCGATCAGAGAACAGGCAGAAAACATCATCCACCTGTTCACACTGACAAACCTGGG | |
| | AGCACCGGCAGCATTCAAGTACTTCGACACAACAATCGACAGAAAGAGATACACAAGCACAAAGGAAGTCCTGGACGCAACACTGA | |
| | TCCACCAGAGCATCACAGGACTGTACGAAACAAGAATCGACCTGAGCCAGCTGGGAGGAGACGGAGGAGGAAGCAGAGCAGCAAAG | |
| | AGAAAGTACTTCGCAGTCTAG | |
| Cas9 ORF | CCTAAGAAAAAGCGGAAGGTCGACGGGGATAAGAAGTACTCAATCGGGCTGGATATCGGAACTAATTCCGTGGGTTGGGCAGTGAT | 341 |
| using codons | CACGGATGAATACAAAGTGCCGTCCAAGAAGTTCAAGGTCCTGGGGAACACCGATAGACACAGCATCAAGAAAAATCTCATCGGAG | |
| with | CCCTGCTGTTTGACTCCGGCGAAACCGCAGAAGCGACCCGGCTCAAACGTACCGCGAGGCGACGCTACACCCGGCGGAAGAATCGC | |
| generally | ATCTGCTATCTGCAAGAGATCTTTTCGAACGAAATGGCAAAGGTCGACGACAGCTTCTTCCACCGCCTGGAAGAATCTTTCCTGGT | |
| high | GGAGGAGGACAAGAAGCATGAACGGCATCCTATCTTTGGAAACATCGTCGACGAAGTGGCGTACCACGAAAAGTACCCGACCATCT | |
| expression | ACCATCTGCGGAAGAAGTTGGTTGACTCAACTGACAAGGCCGACCTCAGATTGATCTACTTGGCCCTCGCCCATATGATCAAATTC | |
| in humans | CGCGGACACTTCCTGATCGAAGGCGATCTGAACCCTGATAACTCCGACGTGGATAAGCTTTTCATTCAACTGGTGCAGACCTACAA | |
| (no start or | CCAACTGTTCGAAGAAAACCCAATCAATGCTAGCGGCGTCGATGCCAAGGCCATCCTGTCCGCCCGGCTGTCGAAGTCGCGGCGCC | |
| stop codons; | TCGAAAACCTGATCGCACAGCTGCCGGGAGAGAAAAAGAACGGACTTTTCGGCAACTTGATCGCTCTCTCACTGGGACTCACTCCC | |
| suitable for | AATTTCAAGTCCAATTTTGACCTGGCCGAGGACGCGAAGCTGCAACTCTCAAAGGACACCTACGACGACGACTTGGACAATTTGCT | |
| inclusion in | GGCACAAATTGGCGATCAGTACGCGGATCTGTTCCTTGCCGCTAAGAACCTTTCGGACGCAATCTTGCTGTCCGATATCCTGCGCG | |
| fusion | TGAACACCGAAATAACCAAAGCGCCGCTTAGCGCCTCGATGATTAAGCGGTACGACGAGCATCACCAGGATCTCACGCTGCTCAAA | |
| protein | GCGCTCGTGAGACAGCAACTGCCTGAAAAGTACAAGGAGATCTTCTTCGACCAGTCCAAGAATGGGTACGCAGGGTACATCGATGG | |
| coding | AGGCGCTAGCCAGGAAGAGTTCTATAAGTTCATCAAGCCAATCCTGGAAAAGATGGACGGAACCGAAGAACTGCTGGTCAAGCTGA | |
| sequence) | ACAGGGAGGATCTGCTCCGGAAACAGAGAACCTTTGACAACGGATCCATTCCCCACCAGATCCATCTGGGTGAGCTGCACGCCATC | |
| | TTGCGGCGCCAGGAGGACTTTTACCCATTCCTCAAGGACAACCGGGAAAAGATCGAGAAAATTCTGACGTTCCGCATCCCGTATTA | |
| | CGTGGGCCCACTGGCGCGCGGCAATTCGCGCTTCGCGTGGATGACTAGAAAATCAGAGGAAACCATCACTCCTTGGAATTTCGAGG | |
| | AAGTTGTGGATAAGGGAGCTTCGGCACAAAGCTTCATCGAACGAATGACCAACTTCGACAAGAATCTCCCAAACGAGAAGGTGCTT | |
| | CCTAAGCACAGCCTCCTTTACGAATACTTCACTGTCTACAACGAACTGACTAAAGTGAAATACGTTACTGAAGGAATGAGGAAGCC | |
| | GGCCTTTCTGTCCGGAGAACAGAAGAAAGCAATTGTCGATCTGCTGTTCAAGACCAACCGCAAGGTGACCGTCAAGCAGCTTAAAG | |
| | AGGACTACTTCAAGAAGATCGAGTGTTTCGACTCAGTGGAAATCAGCGGGGTGGAGGACAGATTCAACGCTTCGCTGGGAACCTAT | |
| | CATGATCTCCTGAAGATCATCAAGGACAAGGACTTCCTTGACAACGAGGAGAACGAGGACATCCTGGAAGATATCGTCCTGACCTT | |
| | GACCCTTTTCGAGGATCGCGAGATGATCGAGGAGAGGCTTAAGACCTACGCTCATCTCTTCGACGATAAGGTCATGAAACAACTCA | |
| | AGCGCCGCCGGTACACTGGTTGGGGCCGCCTCTCCCGCAAGCTGATCAACGGTATTCGCGATAAACAGAGCGGTAAAACTATCCTG | |
| | GATTTCCTCAAATCGGATGGCTTCGCTAATCGTAACTTCATGCAATTGATCCACGACGACAGCCTGACCTTTAAGGAGGACATCCA | |
| | AAAAGCACAAGTGTCCGGACAGGGAGACTCACTCCATGAACACATCGCGAATCTGGCCGGTTCGCCGGCGATTAAGAAGGGAATTC | |
| | TGCAAACTGTGAAGGTGGTCGACGAGCTGGTGAAGGTCATGGGACGGCACAAACCGGAGAATATCGTGATTGAAATGGCCCGAGAA | |
| | AACCAGACTACCCAGAAGGGCCAGAAAAACTCCCGCGAAAGGATGAAGCGGATCGAAGAAGGAATCAAGGAGCTGGGCAGCCAGAT | |
| | CCTGAAAGAGCACCCGGTGGAAAACACGCAGCTGCAGAACGAGAAGCTCTACCTGTACTATTTGCAAAATGGACGGGACATGTACG | |
| | TGGACCAAGAGCTGGACATCAATCGGTTGTCTGATTACGACGTGGACCACATCGTTCCACAGTCCTTTCTGAAGGATGACTCGATC | |
| | GATAACAAGGTGTTGACTCGCAGCGACAAGAACAGAGGGAAGTCAGATAATGTGCCATCGGAGGAGGTCGTGAAGAAGATGAAGAA | |
| | TTACTGGCGGCAGCTCCTGAATGCGAAGCTGATTACCCAGAGAAAGTTTGACAATCTCACTAAAGCCGAGCGCGGCGGACTCTCAG | |
| | AGCTGGATAAGGCTGGATTCATCAAACGGCAGCTGGTCGAGACTCGGCAGATTACCAAGCACGTGGCGCAGATCTTGGACTCCCGC | |
| | ATGAACACTAAATACGACGAGAACGATAAGCTCATCCGGGAAGTGAAGGTGATTACCCTGAAAAGCAAACTTGTGTCGGACTTTCG | |
| | GAAGGACTTTCAGTTTTACAAAGTGAGAGAAATCAACAACTACCATCACGCGCATGACGCATACCTCAACGCTGTGGTCGGTACCG | |
| | CCCTGATCAAAAAGTACCCTAAACTTGAATCGGAGTTTGTGTACGGAGACTACAAGGTCTACGACGTGAGGAAGATGATAGCCAAG | |
| | TCCGAACAGGAAATCGGGAAAGCAACTGCGAAATACTTCTTTTACTCAAACATCATGAACTTTTTCAAGACTGAAATTACGCTGGC | |
| | CAATGGAGAAATCAGGAAGAGGCCACTGATCGAAACTAACGGAGAAACGGGCGAAATCGTGTGGGACAAGGGCAGGGACTTCGCAA | |
| | CTGTTCGCAAAGTGCTCTCTATGCCGCAAGTCAATATTGTGAAGAAAACCGAAGTGCAAACCGGCGGATTTTCAAAGGAATCGATC | |
| | CTCCCAAAGAGAAATAGCGACAAGCTCATTGCACGCAAGAAAGACTGGGACCCGAAGAAGTACGGAGGATTCGATTCGCCGACTGT | |
| | CGCATACTCCGTCCTCGTGGTGGCCAAGGTGGAGAAGGGAAAGAGCAAAAAGCTCAAATCCGTCAAAGAGCTGCTGGGGATTACCA | |
| | TCATGGAACGATCCTCGTTCGAGAAGAACCCGATTGATTTCCTCGAGGCGAAGGGTTACAAGGAGGTGAAGAAGGATCTGATCATC | |
| | AAACTCCCCAAGTACTCACTGTTCGAACTGGAAAATGGTCGGAAGCGCATGCTGGCTTCGGCCGGAGAACTCCAAAAAGGAAATGA | |
| | GCTGGCCTTGCCTAGCAAGTACGTCAACTTCCTCTATCTTGCTTCGCACTACGAAAAACTCAAAGGGTCACCGGAAGATAACGAAC | |
| | AGAAGCAGCTTTTCGTGGAGCAGCACAAGCATTATCTGGATGAAATCATCGAACAAATCTCCGAGTTTTCAAAGCGCGTGATCCTC | |
| | GCCGACGCCAACCTCGACAAAGTCCTGTCGGCCTACAATAAGCATAGAGATAAGCCGATCAGAGAACAGGCCGAGAACATTATCCA | |
| | CTTGTTCACCCTGACTAACCTGGGAGCCCCAGCCGCCTTCAAGTACTTCGATACTACTATCGATCGCAAAAGATACACGTCCACCA | |
| | AGGAAGTTCTGGACGCGACCCTGATCCACCAAAGCATCACTGGACTCTACGAAACTAGGATCGATCTGTCGCAGCTGGGTGGCGAT | |
| Cas9 ORF | GACAAGAAGTACTCTATCGGTTTGGACATCGGTACCAACTCTGTCGGTTGGGCCGTCATCACCGACGAATACAAGGTCCCATCTAA | 342 |
| using long | GAAGTTCAAGGTCTTGGGTAACACCGACAGACACTCTATCAAGAAGAACTTGATCGGTGCCTTGTTGTTCGACTCTGGTGAAACCG | |
| half life | CCGAAGCCACCAGATTGAAGAGAACCGCCAGAAGAAGATACACCAGAAGAAAGAACAGAATCTGCTACTTGCAAGAAATCTTCTCT | |
| codons of | AACGAAATGGCCAAGGTCGACGACTCTTTCTTCCACAGATTGGAAGAATCTTTCTTGGTCGAAGAAGACAAGAAGCACGAAAGACA | |
| Table 4 (no | CCCAATCTTCGGTAACATCGTCGACGAAGTCGCCTACCACGAAAAGTACCCAACCATCTACCACTTGAGAAAGAAGTTGGTCGACT | |
| start or | CTACCGACAAGGCCGACTTGAGATTGATCTACTTGGCCTTGGCCCACATGATCAAGTTCAGAGGTCACTTCTTGATCGAAGGTGAC | |
| stop codons; | TTGAACCCAGACAACTCTGACGTCGACAAGTTGTTCATCCAATTGGTCCAAACCTACAACCAATTGTTCGAAGAAAACCCAATCAA | |
| suitable for | CGCCTCTGGTGTCGACGCCAAGGCCATCTTGTCTGCCAGATTGTCTAAGAGCAGAAGATTGGAAAACTTGATCGCCCAATTGCCAG | |
| inclusion in | GTGAAAAGAAGAACGGTTTGTTCGGTAACTTGATCGCCTTGTCTTTGGGTTTGACCCCAAACTTCAAGTCTAACTTCGACTTGGCC | |
| fusion | GAAGACGCCAAGTTGCAATTGTCTAAGGACACCTACGACGACGACTTGGACAACTTGTTGGCCCAAATCGGTGACCAATACGCCGA | |
| protein | CTTGTTCTTGGCCGCCAAGAACTTGTCTGACGCCATCTTGTTGTCTGACATCTTGAGAGTCAACACCGAAATCACCAAGGCCCCAT | |
| coding | TGTCTGCCTCTATGATCAAGAGATACGACGAACACCACCAAGACTTGACCTTGTTGAAGGCCTTGGTCAGACAACAATTGCCAGAA | |
| sequence) | AAGTACAAGGAAATCTTCTTCGACCAATCTAAGAACGGTTACGCCGGTTACATCGACGGTGGTGCCTCTCAAGAAGAATTCTACAA | |
| | GTTCATCAAGCCAATCTTGGAAAAGATGGACGGTACCGAAGAATTGTTGGTCAAGTTGAACAGAGAAGACTTGTTGAGAAAGCAAA | |
| | GAACCTTCGACAACGGTTCTATCCCACACCAAATCCACTTGGGTGAATTGCACGCCATCTTGAGAAGACAAGAAGACTTCTACCCA | |
| | TTCTTGAAGGACAACAGAGAAAAGATCGAAAAGATCTTGACCTTCAGAATCCCATACTACGTCGGTCCATTGGCCAGAGGTAACAG | |
| | CAGATTCGCCTGGATGACCAGAAAGTCTGAAGAAACCATCACCCCATGGAACTTCGAAGAAGTCGTCGACAAGGGTGCCTCTGCCC | |
| | AATCTTTCATCGAAAGAATGACCAACTTCGACAAGAACTTGCCAAACGAAAAGGTCTTGCCAAAGCACTCTTTGTTGTACGAATAC | |
| | TTCACCGTCTACAACGAATTGACCAAGGTCAAGTACGTCACCGAAGGTATGAGAAAGCCAGCCTTCTTGTCTGGTGAACAAAAGAA | |
| | GGCCATCGTCGACTTGTTGTTCAAGACCAACAGAAAGGTCACCGTCAAGCAATTGAAGGAAGACTACTTCAAGAAGATCGAATGCT | |
| | TCGACTCTGTCGAAATCTCTGGTGTCGAAGACAGATTCAACGCCTCTTTGGGTACCTACCACGACTTGTTGAAGATCATCAAGGAC | |
| | AAGGACTTCTTGGACAACGAAGAAAACGAAGACATCTTGGAAGACATCGTCTTGACCTTGACCTTGTTCGAAGACAGAGAAATGAT | |
| | CGAAGAAAGATTGAAGACCTACGCCCACTTGTTCGACGACAAGGTCATGAAGCAATTGAAGAGAAGAAGATACACCGGTTGGGGTA | |
| | GATTGAGCAGAAAGTTGATCAACGGTATCAGAGACAAGCAATCTGGTAAGACCATCTTGGACTTCTTGAAGTCTGACGGTTTCGCC | |
| | AACAGAAACTTCATGCAATTGATCCACGACGACTCTTTGACCTTCAAGGAAGACATCCAAAAGGCCCAAGTCTCTGGTCAAGGTGA | |
| | CTCTTTGCACGAACACATCGCCAACTTGGCCGGTTCTCCAGCCATCAAGAAGGGTATCTTGCAAACCGTCAAGGTCGTCGACGAAT | |
| | TGGTCAAGGTCATGGGTAGACACAAGCCAGAAAACATCGTCATCGAAATGGCCAGAGAAAACCAAACCACCCAAAAGGGTCAAAAG | |
| | AACAGCAGAGAAAGAATGAAGAGAATCGAAGAAGGTATCAAGGAATTGGGTTCTCAAATCTTGAAGGAACACCCAGTCGAAAACAC | |
| | CCAATTGCAAAACGAAAAGTTGTACTTGTACTACTTGCAAAACGGTAGAGACATGTACGTCGACCAAGAATTGGACATCAACAGAT | |
| | TGTCTGACTACGACGTCGACCACATCGTCCCACAATCTTTCTTGAAGGACGACTCTATCGACAACAAGGTCTTGACCAGATCTGAC | |
| | AAGAACAGAGGTAAGTCTGACAACGTCCCATCTGAAGAAGTCGTCAAGAAGATGAAGAACTACTGGAGACAATTGTTGAACGCCAA | |
| | GTTGATCACCCAAAGAAAGTTCGACAACTTGACCAAGGCCGAAAGAGGTGGTTTGTCTGAATTGGACAAGGCCGGTTTCATCAAGA | |
| | GACAATTGGTCGAAACCAGACAAATCACCAAGCACGTCGCCCAAATCTTGGACAGCAGAATGAACACCAAGTACGACGAAAACGAC | |
| | AAGTTGATCAGAGAAGTCAAGGTCATCACCTTGAAGTCTAAGTTGGTCTCTGACTTCAGAAAGGACTTCCAATTCTACAAGGTCAG | |
| | AGAAATCAACAACTACCACCACGCCCACGACGCCTACTTGAACGCCGTCGTCGGTACCGCCTTGATCAAGAAGTACCCAAAGTTGG | |
| | AATCTGAATTCGTCTACGGTGACTACAAGGTCTACGACGTCAGAAAGATGATCGCCAAGTCTGAACAAGAAATCGGTAAGGCCACC | |
| | GCCAAGTACTTCTTCTACTCTAACATCATGAACTTCTTCAAGACCGAAATCACCTTGGCCAACGGTGAAATCAGAAAGAGACCATT | |
| | GATCGAAACCAACGGTGAAACCGGTGAAATCGTCTGGGACAAGGGTAGAGACTTCGCCACCGTCAGAAAGGTCTTGTCTATGCCAC | |
| | AAGTCAACATCGTCAAGAAGACCGAAGTCCAAACCGGTGGTTTCTCTAAGGAATCTATCTTGCCAAAGAGAAACTCTGACAAGTTG | |
| | ATCGCCAGAAAGAAGGACTGGGACCCAAAGAAGTACGGTGGTTTCGACTCTCCAACCGTCGCCTACTCTGTCTTGGTCGTCGCCAA | |
| | GGTCGAAAAGGGTAAGTCTAAGAAGTTGAAGTCTGTCAAGGAATTGTTGGGTATCACCATCATGGAAAGATCTTCTTTCGAAAAGA | |
| | ACCCAATCGACTTCTTGGAAGCCAAGGGTTACAAGGAAGTCAAGAAGGACTTGATCATCAAGTTGCCAAAGTACTCTTTGTTCGAA | |
| | TTGGAAAACGGTAGAAAGAGAATGTTGGCCTCTGCCGGTGAATTGCAAAAGGGTAACGAATTGGCCTTGCCATCTAAGTACGTCAA | |
| | CTTCTTGTACTTGGCCTCTCACTACGAAAAGTTGAAGGGTTCTCCAGAAGACAACGAACAAAAGCAATTGTTCGTCGAACAACACA | |
| | AGCACTACTTGGACGAAATCATCGAACAAATCTCTGAATTCTCTAAGAGAGTCATCTTGGCCGACGCCAACTTGGACAAGGTCTTG | |
| | TCTGCCTACAACAAGCACAGAGACAAGCCAATCAGAGAACAAGCCGAAAACATCATCCACTTGTTCACCTTGACCAACTTGGGTGC | |
| | CCCAGCCGCCTTCAAGTACTTCGACACCACCATCGACAGAAAGAGATACACCTCTACCAAGGAAGTCTTGGACGCCACCTTGATCC | |
| | ACCAATCTATCACCGGTTTGTACGAAACCAGAATCGACTTGTCTCAATTGGGTGGTGACGGTGGTGGTTCTCCAAAGAAGAAGAGA | |
| | AAGGTC | |
| Cas9 ORF | GATAAAAAATATTCTATTGGTTTAGATATTGGTACTAATTCTGTTGGTTGGGCTGTTATTACTGATGAATATAAAGTTCCTTCTAA | 343 |
| using U rich | AAAATTTAAAGTTTTAGGTAATACTGATCGTCATTCTATTAAAAAAAATTTAATTGGTGCTTTATTATTTGATTCTGGTGAAACTG | |
| codons of | CTGAAGCTACTCGTTTAAAACGTACTGCTCGTCGTCGTTATACTCGTCGTAAAAATCGTATTTGTTATTTACAAGAAATTTTTTCT | |
| Table 4 (no | AATGAAATGGCTAAAGTTGATGATTCTTTTTTTCATCGTTTAGAAGAATCTTTTTTAGTTGAAGAAGATAAAAAACATGAACGTCA | |
| start or | TCCTATTTTTGGTAATATTGTTGATGAAGTTGCTTATCATGAAAAATATCCTACTATTTATCATTTACGTAAAAAATTAGTTGATT | |
| stop codons; | CTACTGATAAAGCTGATTTACGTTTAATTTATTTAGCTTTAGCTCATATGATTAAATTTCGTGGTCATTTTTTAATTGAAGGTGAT | |
| suitable for | TTAAATCCTGATAATTCTGATGTTGATAAATTATTTATTCAATTAGTTCAAACTTATAATCAATTATTTGAAGAAAATCCTATTAA | |
| inclusion in | TGCTTCTGGTGTTGATGCTAAAGCTATTTTATCTGCTCGTTTATCTAAATCTCGTCGTTTAGAAAATTTAATTGCTCAATTACCTG | |
| fusion | GTGAAAAAAAAAATGGTTTATTTGGTAATTTAATTGCTTTATCTTTAGGTTTAACTCCTAATTTTAAATCTAATTTTGATTTAGCT | |
| protein | GAAGATGCTAAATTACAATTATCTAAAGATACTTATGATGATGATTTAGATAATTTATTAGCTCAAATTGGTGATCAATATGCTGA | |
| coding | TTTATTTTTAGCTGCTAAAAATTTATCTGATGCTATTTTATTATCTGATATTTTACGTGTTAATACTGAAATTACTAAAGCTCCTT | |
| sequence) | TATCTGCTTCTATGATTAAACGTTATGATGAACATCATCAAGATTTAACTTTATTAAAAGCTTTAGTTCGTCAACAATTACCTGAA | |
| | AAATATAAAGAAATTTTTTTTGATCAATCTAAAAATGGTTATGCTGGTTATATTGATGGTGGTGCTTCTCAAGAAGAATTTTATAA | |
| | ATTTATTAAACCTATTTTAGAAAAAATGGATGGTACTGAAGAATTATTAGTTAAATTAAATCGTGAAGATTTATTACGTAAACAAC | |
| | GTACTTTTGATAATGGTTCTATTCCTCATCAAATTCATTTAGGTGAATTACATGCTATTTTACGTCGTCAAGAAGATTTTTATCCT | |
| | TTTTTAAAAGATAATCGTGAAAAAATTGAAAAAATTTTAACTTTTCGTATTCCTTATTATGTTGGTCCTTTAGCTCGTGGTAATTC | |
| | TCGTTTTGCTTGGATGACTCGTAAATCTGAAGAAACTATTACTCCTTGGAATTTTGAAGAAGTTGTTGATAAAGGTGCTTCTGCTC | |
| | AATCTTTTATTGAACGTATGACTAATTTTGATAAAAATTTACCTAATGAAAAAGTTTTACCTAAACATTCTTTATTATATGAATAT | |
| | TTTACTGTTTATAATGAATTAACTAAAGTTAAATATGTTACTGAAGGTATGCGTAAACCTGCTTTTTTATCTGGTGAACAAAAAAA | |
| | AGCTATTGTTGATTTATTATTTAAAACTAATCGTAAAGTTACTGTTAAACAATTAAAAGAAGATTATTTTAAAAAAATTGAATGTT | |
| | TTGATTCTGTTGAAATTTCTGGTGTTGAAGATCGTTTTAATGCTTCTTTAGGTACTTATCATGATTTATTAAAAATTATTAAAGAT | |
| | AAAGATTTTTTAGATAATGAAGAAAATGAAGATATTTTAGAAGATATTGTTTTAACTTTAACTTTATTTGAAGATCGTGAAATGAT | |
| | TGAAGAACGTTTAAAAACTTATGCTCATTTATTTGATGATAAAGTTATGAAACAATTAAAACGTCGTCGTTATACTGGTTGGGGTC | |
| | GTTTATCTCGTAAATTAATTAATGGTATTCGTGATAAACAATCTGGTAAAACTATTTTAGATTTTTTAAAATCTGATGGTTTTGCT | |
| | AATCGTAATTTTATGCAATTAATTCATGATGATTCTTTAACTTTTAAAGAAGATATTCAAAAAGCTCAAGTTTCTGGTCAAGGTGA | |
| | TTCTTTACATGAACATATTGCTAATTTAGCTGGTTCTCCTGCTATTAAAAAAGGTATTTTACAAACTGTTAAAGTTGTTGATGAAT | |
| | TAGTTAAAGTTATGGGTCGTCATAAACCTGAAAATATTGTTATTGAAATGGCTCGTGAAAATCAAACTACTCAAAAAGGTCAAAAA | |
| | AATTCTCGTGAACGTATGAAACGTATTGAAGAAGGTATTAAAGAATTAGGTTCTCAAATTTTAAAAGAACATCCTGTTGAAAATAC | |
| | TCAATTACAAAATGAAAAATTATATTTATATTATTTACAAAATGGTCGTGATATGTATGTTGATCAAGAATTAGATATTAATCGTT | |
| | TATCTGATTATGATGTTGATCATATTGTTCCTCAATCTTTTTTAAAAGATGATTCTATTGATAATAAAGTTTTAACTCGTTCTGAT | |
| | AAAAATCGTGGTAAATCTGATAATGTTCCTTCTGAAGAAGTTGTTAAAAAAATGAAAAATTATTGGCGTCAATTATTAAATGCTAA | |
| | ATTAATTACTCAACGTAAATTTGATAATTTAACTAAAGCTGAACGTGGTGGTTTATCTGAATTAGATAAAGCTGGTTTTATTAAAC | |
| | GTCAATTAGTTGAAACTCGTCAAATTACTAAACATGTTGCTCAAATTTTAGATTCTCGTATGAATACTAAATATGATGAAAATGAT | |
| | AAATTAATTCGTGAAGTTAAAGTTATTACTTTAAAATCTAAATTAGTTTCTGATTTTCGTAAAGATTTTCAATTTTATAAAGTTCG | |
| | TGAAATTAATAATTATCATCATGCTCATGATGCTTATTTAAATGCTGTTGTTGGTACTGCTTTAATTAAAAAATATCCTAAATTAG | |
| | AATCTGAATTTGTTTATGGTGATTATAAAGTTTATGATGTTCGTAAAATGATTGCTAAATCTGAACAAGAAATTGGTAAAGCTACT | |
| | GCTAAATATTTTTTTTATTCTAATATTATGAATTTTTTTAAAACTGAAATTACTTTAGCTAATGGTGAAATTCGTAAACGTCCTTT | |
| | AATTGAAACTAATGGTGAAACTGGTGAAATTGTTTGGGATAAAGGTCGTGATTTTGCTACTGTTCGTAAAGTTTTATCTATGCCTC | |
| | AAGTTAATATTGTTAAAAAAACTGAAGTTCAAACTGGTGGTTTTTCTAAAGAATCTATTTTACCTAAACGTAATTCTGATAAATTA | |
| | ATTGCTCGTAAAAAAGATTGGGATCCTAAAAAATATGGTGGTTTTGATTCTCCTACTGTTGCTTATTCTGTTTTAGTTGTTGCTAA | |
| | AGTTGAAAAAGGTAAATCTAAAAAATTAAAATCTGTTAAAGAATTATTAGGTATTACTATTATGGAACGTTCTTCTTTTGAAAAAA | |
| | ATCCTATTGATTTTTTAGAAGCTAAAGGTTATAAAGAAGTTAAAAAAGATTTAATTATTAAATTACCTAAATATTCTTTATTTGAA | |
| | TTAGAAAATGGTCGTAAACGTATGTTAGCTTCTGCTGGTGAATTACAAAAAGGTAATGAATTAGCTTTACCTTCTAAATATGTTAA | |
| | TTTTTTATATTTAGCTTCTCATTATGAAAAATTAAAAGGTTCTCCTGAAGATAATGAACAAAAACAATTATTTGTTGAACAACATA | |
| | AACATTATTTAGATGAAATTATTGAACAAATTTCTGAATTTTCTAAACGTGTTATTTTAGCTGATGCTAATTTAGATAAAGTTTTA | |
| | TCTGCTTATAATAAACATCGTGATAAACCTATTCGTGAACAAGCTGAAAATATTATTCATTTATTTACTTTAACTAATTTAGGTGC | |
| | TCCTGCTGCTTTTAAATATTTTGATACTACTATTGATCGTAAACGTTATACTTCTACTAAAGAAGTTTTAGATGCTACTTTAATTC | |
| | ATCAATCTATTACTGGTTTATATGAAACTCGTATTGATTTATCTCAATTAGGTGGTGATGGTGGTGGTTCTCCTAAAAAAAAACGT | |
| | AAAGTT | |
| Cas9 ORF | GACAAAAAATACTCCATCGGCCTCGACATCGGCACCAACTCCGTCGGCTGGGCCGTCATCACCGACGAATACAAAGTCCCCTCCAA | 344 |
| using low G | AAAATTCAAAGTCCTCGGCAACACCGACAGACACTCCATCAAAAAAAACCTCATCGGCGCCCTCCTCTTCGACTCCGGCGAAACCG | |
| codons of | CCGAAGCCACCAGACTCAAAAGAACCGCCAGAAGAAGATACACCAGAAGAAAAAACAGAATCTGCTACCTCCAAGAAATCTTCTCC | |
| Table 4 (no | AACGAAATGGCCAAAGTCGACGACTCCTTCTTCCACAGACTCGAAGAATCCTTCCTCGTCGAAGAAGACAAAAAACACGAAAGACA | |
| start or | CCCCATCTTCGGCAACATCGTCGACGAAGTCGCCTACCACGAAAAATACCCCACCATCTACCACCTCAGAAAAAAACTCGTCGACT | |
| stop codons; | CCACCGACAAAGCCGACCTCAGACTCATCTACCTCGCCCTCGCCCACATGATCAAATTCAGAGGCCACTTCCTCATCGAAGGCGAC | |
| suitable for | CTCAACCCCGACAACTCCGACGTCGACAAACTCTTCATCCAACTCGTCCAAACCTACAACCAACTCTTCGAAGAAAACCCCATCAA | |
| inclusion in | CGCCTCCGGCGTCGACGCCAAAGCCATCCTCTCCGCCAGACTCTCCAAATCCAGAAGACTCGAAAACCTCATCGCCCAACTCCCCG | |
| fusion | GCGAAAAAAAAAACGGCCTCTTCGGCAACCTCATCGCCCTCTCCCTCGGCCTCACCCCCAACTTCAAATCCAACTTCGACCTCGCC | |
| protein | GAAGACGCCAAACTCCAACTCTCCAAAGACACCTACGACGACGACCTCGACAACCTCCTCGCCCAAATCGGCGACCAATACGCCGA | |
| coding | CCTCTTCCTCGCCGCCAAAAACCTCTCCGACGCCATCCTCCTCTCCGACATCCTCAGAGTCAACACCGAAATCACCAAAGCCCCCC | |
| sequence) | TCTCCGCCTCCATGATCAAAAGATACGACGAACACCACCAAGACCTCACCCTCCTCAAAGCCCTCGTCAGACAACAACTCCCCGAA | |
| | AAATACAAAGAAATCTTCTTCGACCAATCCAAAAACGGCTACGCCGGCTACATCGACGGCGGCGCCTCCCAAGAAGAATTCTACAA | |
| | ATTCATCAAACCCATCCTCGAAAAAATGGACGGCACCGAAGAACTCCTCGTCAAACTCAACAGAGAAGACCTCCTCAGAAAACAAA | |
| | GAACCTTCGACAACGGCTCCATCCCCCACCAAATCCACCTCGGCGAACTCCACGCCATCCTCAGAAGACAAGAAGACTTCTACCCC | |
| | TTCCTCAAAGACAACAGAGAAAAAATCGAAAAAATCCTCACCTTCAGAATCCCCTACTACGTCGGCCCCCTCGCCAGAGGCAACTC | |
| | CAGATTCGCCTGGATGACCAGAAAATCCGAAGAAACCATCACCCCCTGGAACTTCGAAGAAGTCGTCGACAAAGGCGCCTCCGCCC | |
| | AATCCTTCATCGAAAGAATGACCAACTTCGACAAAAACCTCCCCAACGAAAAAGTCCTCCCCAAACACTCCCTCCTCTACGAATAC | |
| | TTCACCGTCTACAACGAACTCACCAAAGTCAAATACGTCACCGAAGGCATGAGAAAACCCGCCTTCCTCTCCGGCGAACAAAAAAA | |
| | AGCCATCGTCGACCTCCTCTTCAAAACCAACAGAAAAGTCACCGTCAAACAACTCAAAGAAGACTACTTCAAAAAAATCGAATGCT | |
| | TCGACTCCGTCGAAATCTCCGGCGTCGAAGACAGATTCAACGCCTCCCTCGGCACCTACCACGACCTCCTCAAAATCATCAAAGAC | |
| | AAAGACTTCCTCGACAACGAAGAAAACGAAGACATCCTCGAAGACATCGTCCTCACCCTCACCCTCTTCGAAGACAGAGAAATGAT | |
| | CGAAGAAAGACTCAAAACCTACGCCCACCTCTTCGACGACAAAGTCATGAAACAACTCAAAAGAAGAAGATACACCGGCTGGGGCA | |
| | GACTCTCCAGAAAACTCATCAACGGCATCAGAGACAAACAATCCGGCAAAACCATCCTCGACTTCCTCAAATCCGACGGCTTCGCC | |
| | AACAGAAACTTCATGCAACTCATCCACGACGACTCCCTCACCTTCAAAGAAGACATCCAAAAAGCCCAAGTCTCCGGCCAAGGCGA | |
| | CTCCCTCCACGAACACATCGCCAACCTCGCCGGCTCCCCCGCCATCAAAAAAGGCATCCTCCAAACCGTCAAAGTCGTCGACGAAC | |
| | TCGTCAAAGTCATGGGCAGACACAAACCCGAAAACATCGTCATCGAAATGGCCAGAGAAAACCAAACCACCCAAAAAGGCCAAAAA | |
| | AACTCCAGAGAAAGAATGAAAAGAATCGAAGAAGGCATCAAAGAACTCGGCTCCCAAATCCTCAAAGAACACCCCGTCGAAAACAC | |
| | CCAACTCCAAAACGAAAAACTCTACCTCTACTACCTCCAAAACGGCAGAGACATGTACGTCGACCAAGAACTCGACATCAACAGAC | |
| | TCTCCGACTACGACGTCGACCACATCGTCCCCCAATCCTTCCTCAAAGACGACTCCATCGACAACAAAGTCCTCACCAGATCCGAC | |
| | AAAAACAGAGGCAAATCCGACAACGTCCCCTCCGAAGAAGTCGTCAAAAAAATGAAAAACTACTGGAGACAACTCCTCAACGCCAA | |
| | ACTCATCACCCAAAGAAAATTCGACAACCTCACCAAAGCCGAAAGAGGCGGCCTCTCCGAACTCGACAAAGCCGGCTTCATCAAAA | |
| | GACAACTCGTCGAAACCAGACAAATCACCAAACACGTCGCCCAAATCCTCGACTCCAGAATGAACACCAAATACGACGAAAACGAC | |
| | AAACTCATCAGAGAAGTCAAAGTCATCACCCTCAAATCCAAACTCGTCTCCGACTTCAGAAAAGACTTCCAATTCTACAAAGTCAG | |
| | AGAAATCAACAACTACCACCACGCCCACGACGCCTACCTCAACGCCGTCGTCGGCACCGCCCTCATCAAAAAATACCCCAAACTCG | |
| | AATCCGAATTCGTCTACGGCGACTACAAAGTCTACGACGTCAGAAAAATGATCGCCAAATCCGAACAAGAAATCGGCAAAGCCACC | |
| | GCCAAATACTTCTTCTACTCCAACATCATGAACTTCTTCAAAACCGAAATCACCCTCGCCAACGGCGAAATCAGAAAAAGACCCCT | |
| | CATCGAAACCAACGGCGAAACCGGCGAAATCGTCTGGGACAAAGGCAGAGACTTCGCCACCGTCAGAAAAGTCCTCTCCATGCCCC | |
| | AAGTCAACATCGTCAAAAAAACCGAAGTCCAAACCGGCGGCTTCTCCAAAGAATCCATCCTCCCCAAAAGAAACTCCGACAAACTC | |
| | ATCGCCAGAAAAAAAGACTGGGACCCCAAAAAATACGGCGGCTTCGACTCCCCCACCGTCGCCTACTCCGTCCTCGTCGTCGCCAA | |
| | AGTCGAAAAAGGCAAATCCAAAAAACTCAAATCCGTCAAAGAACTCCTCGGCATCACCATCATGGAAAGATCCTCCTTCGAAAAAA | |
| | ACCCCATCGACTTCCTCGAAGCCAAAGGCTACAAAGAAGTCAAAAAAGACCTCATCATCAAACTCCCCAAATACTCCCTCTTCGAA | |
| | CTCGAAAACGGCAGAAAAAGAATGCTCGCCTCCGCCGGCGAACTCCAAAAAGGCAACGAACTCGCCCTCCCCTCCAAATACGTCAA | |
| | CTTCCTCTACCTCGCCTCCCACTACGAAAAACTCAAAGGCTCCCCCGAAGACAACGAACAAAAACAACTCTTCGTCGAACAACACA | |
| | AACACTACCTCGACGAAATCATCGAACAAATCTCCGAATTCTCCAAAAGAGTCATCCTCGCCGACGCCAACCTCGACAAAGTCCTC | |
| | TCCGCCTACAACAAACACAGAGACAAACCCATCAGAGAACAAGCCGAAAACATCATCCACCTCTTCACCCTCACCAACCTCGGCGC | |
| | CCCCGCCGCCTTCAAATACTTCGACACCACCATCGACAGAAAAAGATACACCTCCACCAAAGAAGTCCTCGACGCCACCCTCATCC | |
| | ACCAATCCATCACCGGCCTCTACGAAACCAGAATCGACCTCTCCCAACTCGGCGGCGACGGCGGCGGCTCCCCCAAAAAAAAAAGA | |
| | AAAGTC | |
| Cas9 ORF | GATAAGAAGTATAGTATTGGATTGGATATTGGAACAAATAGTGTGGGATGGGCTGTGATTACAGATGAGTATAAGGTGCCTAGTAA | 345 |
| using low C | GAAGTTTAAGGTGTTGGGAAATACAGATAGACATAGTATTAAGAAGAATTTGATTGGAGCTTTGTTGTTTGATAGTGGAGAGACAG | |
| codons of | CTGAGGCTACAAGATTGAAGAGAACAGCTAGAAGAAGATATACAAGAAGAAAGAATAGAATTTGTTATTTGCAGGAGATTTTTAGT | |
| Table 4 (no | AATGAGATGGCTAAGGTGGATGATAGTTTTTTTCATAGATTGGAGGAGAGTTTTTTGGTGGAGGAGGATAAGAAGCATGAGAGACA | |
| start or | TCCTATTTTTGGAAATATTGTGGATGAGGTGGCTTATCATGAGAAGTATCCTACAATTTATCATTTGAGAAAGAAGTTGGTGGATA | |
| stop codons; | GTACAGATAAGGCTGATTTGAGATTGATTTATTTGGCTTTGGCTCATATGATTAAGTTTAGAGGACATTTTTTGATTGAGGGAGAT | |
| suitable for | TTGAATCCTGATAATAGTGATGTGGATAAGTTGTTTATTCAGTTGGTGCAGACATATAATCAGTTGTTTGAGGAGAATCCTATTAA | |
| inclusion in | TGCTAGTGGAGTGGATGCTAAGGCTATTTTGAGTGCTAGATTGAGTAAGAGTAGAAGATTGGAGAATTTGATTGCTCAGTTGCCTG | |
| fusion | GAGAGAAGAAGAATGGATTGTTTGGAAATTTGATTGCTTTGAGTTTGGGATTGACACCTAATTTTAAGAGTAATTTTGATTTGGCT | |
| protein | GAGGATGCTAAGTTGCAGTTGAGTAAGGATACATATGATGATGATTTGGATAATTTGTTGGCTCAGATTGGAGATCAGTATGCTGA | |
| coding | TTTGTTTTTGGCTGCTAAGAATTTGAGTGATGCTATTTTGTTGAGTGATATTTTGAGAGTGAATACAGAGATTACAAAGGCTCCTT | |
| sequence) | TGAGTGCTAGTATGATTAAGAGATATGATGAGCATCATCAGGATTTGACATTGTTGAAGGCTTTGGTGAGACAGCAGTTGCCTGAG | |
| | AAGTATAAGGAGATTTTTTTTGATCAGAGTAAGAATGGATATGCTGGATATATTGATGGAGGAGCTAGTCAGGAGGAGTTTTATAA | |
| | GTTTATTAAGCCTATTTTGGAGAAGATGGATGGAACAGAGGAGTTGTTGGTGAAGTTGAATAGAGAGGATTTGTTGAGAAAGCAGA | |
| | GAACATTTGATAATGGAAGTATTCCTCATCAGATTCATTTGGGAGAGTTGCATGCTATTTTGAGAAGACAGGAGGATTTTTATCCT | |
| | TTTTTGAAGGATAATAGAGAGAAGATTGAGAAGATTTTGACATTTAGAATTCCTTATTATGTGGGACCTTTGGCTAGAGGAAATAG | |
| | TAGATTTGCTTGGATGACAAGAAAGAGTGAGGAGACAATTACACCTTGGAATTTTGAGGAGGTGGTGGATAAGGGAGCTAGTGCTC | |
| | AGAGTTTTATTGAGAGAATGACAAATTTTGATAAGAATTTGCCTAATGAGAAGGTGTTGCCTAAGCATAGTTTGTTGTATGAGTAT | |
| | TTTACAGTGTATAATGAGTTGACAAAGGTGAAGTATGTGACAGAGGGAATGAGAAAGCCTGCTTTTTTGAGTGGAGAGCAGAAGAA | |
| | GGCTATTGTGGATTTGTTGTTTAAGACAAATAGAAAGGTGACAGTGAAGCAGTTGAAGGAGGATTATTTTAAGAAGATTGAGTGTT | |
| | TTGATAGTGTGGAGATTAGTGGAGTGGAGGATAGATTTAATGCTAGTTTGGGAACATATCATGATTTGTTGAAGATTATTAAGGAT | |
| | AAGGATTTTTTGGATAATGAGGAGAATGAGGATATTTTGGAGGATATTGTGTTGACATTGACATTGTTTGAGGATAGAGAGATGAT | |
| | TGAGGAGAGATTGAAGACATATGCTCATTTGTTTGATGATAAGGTGATGAAGCAGTTGAAGAGAAGAAGATATACAGGATGGGGAA | |
| | GATTGAGTAGAAAGTTGATTAATGGAATTAGAGATAAGCAGAGTGGAAAGACAATTTTGGATTTTTTGAAGAGTGATGGATTTGCT | |
| | AATAGAAATTTTATGCAGTTGATTCATGATGATAGTTTGACATTTAAGGAGGATATTCAGAAGGCTCAGGTGAGTGGACAGGGAGA | |
| | TAGTTTGCATGAGCATATTGCTAATTTGGCTGGAAGTCCTGCTATTAAGAAGGGAATTTTGCAGACAGTGAAGGTGGTGGATGAGT | |
| | TGGTGAAGGTGATGGGAAGACATAAGCCTGAGAATATTGTGATTGAGATGGCTAGAGAGAATCAGACAACACAGAAGGGACAGAAG | |
| | AATAGTAGAGAGAGAATGAAGAGAATTGAGGAGGGAATTAAGGAGTTGGGAAGTCAGATTTTGAAGGAGCATCCTGTGGAGAATAC | |
| | ACAGTTGCAGAATGAGAAGTTGTATTTGTATTATTTGCAGAATGGAAGAGATATGTATGTGGATCAGGAGTTGGATATTAATAGAT | |
| | TGAGTGATTATGATGTGGATCATATTGTGCCTCAGAGTTTTTTGAAGGATGATAGTATTGATAATAAGGTGTTGACAAGAAGTGAT | |
| | AAGAATAGAGGAAAGAGTGATAATGTGCCTAGTGAGGAGGTGGTGAAGAAGATGAAGAATTATTGGAGACAGTTGTTGAATGCTAA | |
| | GTTGATTACACAGAGAAAGTTTGATAATTTGACAAAGGCTGAGAGAGGAGGATTGAGTGAGTTGGATAAGGCTGGATTTATTAAGA | |
| | GACAGTTGGTGGAGACAAGACAGATTACAAAGCATGTGGCTCAGATTTTGGATAGTAGAATGAATACAAAGTATGATGAGAATGAT | |
| | AAGTTGATTAGAGAGGTGAAGGTGATTACATTGAAGAGTAAGTTGGTGAGTGATTTTAGAAAGGATTTTCAGTTTTATAAGGTGAG | |
| | AGAGATTAATAATTATCATCATGCTCATGATGCTTATTTGAATGCTGTGGTGGGAACAGCTTTGATTAAGAAGTATCCTAAGTTGG | |
| | AGAGTGAGTTTGTGTATGGAGATTATAAGGTGTATGATGTGAGAAAGATGATTGCTAAGAGTGAGCAGGAGATTGGAAAGGCTACA | |
| | GCTAAGTATTTTTTTTATAGTAATATTATGAATTTTTTTAAGACAGAGATTACATTGGCTAATGGAGAGATTAGAAAGAGACCTTT | |
| | GATTGAGACAAATGGAGAGACAGGAGAGATTGTGTGGGATAAGGGAAGAGATTTTGCTACAGTGAGAAAGGTGTTGAGTATGCCTC | |
| | AGGTGAATATTGTGAAGAAGACAGAGGTGCAGACAGGAGGATTTAGTAAGGAGAGTATTTTGCCTAAGAGAAATAGTGATAAGTTG | |
| | ATTGCTAGAAAGAAGGATTGGGATCCTAAGAAGTATGGAGGATTTGATAGTCCTACAGTGGCTTATAGTGTGTTGGTGGTGGCTAA | |
| | GGTGGAGAAGGGAAAGAGTAAGAAGTTGAAGAGTGTGAAGGAGTTGTTGGGAATTACAATTATGGAGAGAAGTAGTTTTGAGAAGA | |
| | ATCCTATTGATTTTTTGGAGGCTAAGGGATATAAGGAGGTGAAGAAGGATTTGATTATTAAGTTGCCTAAGTATAGTTTGTTTGAG | |
| | TTGGAGAATGGAAGAAAGAGAATGTTGGCTAGTGCTGGAGAGTTGCAGAAGGGAAATGAGTTGGCTTTGCCTAGTAAGTATGTGAA | |
| | TTTTTTGTATTTGGCTAGTCATTATGAGAAGTTGAAGGGAAGTCCTGAGGATAATGAGCAGAAGCAGTTGTTTGTGGAGCAGCATA | |
| | AGCATTATTTGGATGAGATTATTGAGCAGATTAGTGAGTTTAGTAAGAGAGTGATTTTGGCTGATGCTAATTTGGATAAGGTGTTG | |
| | AGTGCTTATAATAAGCATAGAGATAAGCCTATTAGAGAGCAGGCTGAGAATATTATTCATTTGTTTACATTGACAAATTTGGGAGC | |
| | TCCTGCTGCTTTTAAGTATTTTGATACAACAATTGATAGAAAGAGATATACAAGTACAAAGGAGGTGTTGGATGCTACATTGATTC | |
| | ATCAGAGTATTACAGGATTGTATGAGACAAGAATTGATTTGAGTCAGTTGGGAGGAGATGGAGGAGGAAGTCCTAAGAAGAAGAGA | |
| | AAGGTG | |
| Cas9 ORF | GACAAGAAGTACTCCATCGGCCTGGACATCGGCACCAACTCCGTGGGCTGGGCCGTGATCACCGACGAGTACAAGGTGCCCTCCAA | 346 |
| using low A | GAAGTTCAAGGTGCTGGGCAACACCGACCGGCACTCCATCAAGAAGAACCTGATCGGCGCCCTGCTGTTCGACTCCGGCGAGACCG | |
| codons of | CCGAGGCCACCCGGCTGAAGCGGACCGCCCGGCGGCGGTACACCCGGCGGAAGAACCGGATCTGCTACCTGCAGGAGATCTTCTCC | |
| Table 4 (no | AACGAGATGGCCAAGGTGGACGACTCCTTCTTCCACCGGCTGGAGGAGTCCTTCCTGGTGGAGGAGGACAAGAAGCACGAGCGGCA | |
| start or | CCCCATCTTCGGCAACATCGTGGACGAGGTGGCCTACCACGAGAAGTACCCCACCATCTACCACCTGCGGAAGAAGCTGGTGGACT | |
| stop codons; | CCACCGACAAGGCCGACCTGCGGCTGATCTACCTGGCCCTGGCCCACATGATCAAGTTCCGGGGCCACTTCCTGATCGAGGGCGAC | |
| suitable for | CTGAACCCCGACAACTCCGACGTGGACAAGCTGTTCATCCAGCTGGTGCAGACCTACAACCAGCTGTTCGAGGAGAACCCCATCAA | |
| inclusion in | CGCCTCCGGCGTGGACGCCAAGGCCATCCTGTCCGCCCGGCTGTCCAAGTCCCGGCGGCTGGAGAACCTGATCGCCCAGCTGCCCG | |
| fusion | GCGAGAAGAAGAACGGCCTGTTCGGCAACCTGATCGCCCTGTCCCTGGGCCTGACCCCCAACTTCAAGTCCAACTTCGACCTGGCC | |
| protein | GAGGACGCCAAGCTGCAGCTGTCCAAGGACACCTACGACGACGACCTGGACAACCTGCTGGCCCAGATCGGCGACCAGTACGCCGA | |
| coding | CCTGTTCCTGGCCGCCAAGAACCTGTCCGACGCCATCCTGCTGTCCGACATCCTGCGGGTGAACACCGAGATCACCAAGGCCCCCC | |
| sequence) | TGTCCGCCTCCATGATCAAGCGGTACGACGAGCACCACCAGGACCTGACCCTGCTGAAGGCCCTGGTGCGGCAGCAGCTGCCCGAG | |
| | AAGTACAAGGAGATCTTCTTCGACCAGTCCAAGAACGGCTACGCCGGCTACATCGACGGCGGCGCCTCCCAGGAGGAGTTCTACAA | |
| | GTTCATCAAGCCCATCCTGGAGAAGATGGACGGCACCGAGGAGCTGCTGGTGAAGCTGAACCGGGAGGACCTGCTGCGGAAGCAGC | |
| | GGACCTTCGACAACGGCTCCATCCCCCACCAGATCCACCTGGGCGAGCTGCACGCCATCCTGCGGCGGCAGGAGGACTTCTACCCC | |
| | TTCCTGAAGGACAACCGGGAGAAGATCGAGAAGATCCTGACCTTCCGGATCCCCTACTACGTGGGCCCCCTGGCCCGGGGCAACTC | |
| | CCGGTTCGCCTGGATGACCCGGAAGTCCGAGGAGACCATCACCCCCTGGAACTTCGAGGAGGTGGTGGACAAGGGCGCCTCCGCCC | |
| | AGTCCTTCATCGAGCGGATGACCAACTTCGACAAGAACCTGCCCAACGAGAAGGTGCTGCCCAAGCACTCCCTGCTGTACGAGTAC | |
| | TTCACCGTGTACAACGAGCTGACCAAGGTGAAGTACGTGACCGAGGGCATGCGGAAGCCCGCCTTCCTGTCCGGCGAGCAGAAGAA | |
| | GGCCATCGTGGACCTGCTGTTCAAGACCAACCGGAAGGTGACCGTGAAGCAGCTGAAGGAGGACTACTTCAAGAAGATCGAGTGCT | |
| | TCGACTCCGTGGAGATCTCCGGCGTGGAGGACCGGTTCAACGCCTCCCTGGGCACCTACCACGACCTGCTGAAGATCATCAAGGAC | |
| | AAGGACTTCCTGGACAACGAGGAGAACGAGGACATCCTGGAGGACATCGTGCTGACCCTGACCCTGTTCGAGGACCGGGAGATGAT | |
| | CGAGGAGCGGCTGAAGACCTACGCCCACCTGTTCGACGACAAGGTGATGAAGCAGCTGAAGCGGCGGCGGTACACCGGCTGGGGCC | |
| | GGCTGTCCCGGAAGCTGATCAACGGCATCCGGGACAAGCAGTCCGGCAAGACCATCCTGGACTTCCTGAAGTCCGACGGCTTCGCC | |
| | AACCGGAACTTCATGCAGCTGATCCACGACGACTCCCTGACCTTCAAGGAGGACATCCAGAAGGCCCAGGTGTCCGGCCAGGGCGA | |
| | CTCCCTGCACGAGCACATCGCCAACCTGGCCGGCTCCCCCGCCATCAAGAAGGGCATCCTGCAGACCGTGAAGGTGGTGGACGAGC | |
| | TGGTGAAGGTGATGGGCCGGCACAAGCCCGAGAACATCGTGATCGAGATGGCCCGGGAGAACCAGACCACCCAGAAGGGCCAGAAG | |
| | AACTCCCGGGAGCGGATGAAGCGGATCGAGGAGGGCATCAAGGAGCTGGGCTCCCAGATCCTGAAGGAGCACCCCGTGGAGAACAC | |
| | CCAGCTGCAGAACGAGAAGCTGTACCTGTACTACCTGCAGAACGGCCGGGACATGTACGTGGACCAGGAGCTGGACATCAACCGGC | |
| | TGTCCGACTACGACGTGGACCACATCGTGCCCCAGTCCTTCCTGAAGGACGACTCCATCGACAACAAGGTGCTGACCCGGTCCGAC | |
| | AAGAACCGGGGCAAGTCCGACAACGTGCCCTCCGAGGAGGTGGTGAAGAAGATGAAGAACTACTGGCGGCAGCTGCTGAACGCCAA | |
| | GCTGATCACCCAGCGGAAGTTCGACAACCTGACCAAGGCCGAGCGGGGCGGCCTGTCCGAGCTGGACAAGGCCGGCTTCATCAAGC | |
| | GGCAGCTGGTGGAGACCCGGCAGATCACCAAGCACGTGGCCCAGATCCTGGACTCCCGGATGAACACCAAGTACGACGAGAACGAC | |
| | AAGCTGATCCGGGAGGTGAAGGTGATCACCCTGAAGTCCAAGCTGGTGTCCGACTTCCGGAAGGACTTCCAGTTCTACAAGGTGCG | |
| | GGAGATCAACAACTACCACCACGCCCACGACGCCTACCTGAACGCCGTGGTGGGCACCGCCCTGATCAAGAAGTACCCCAAGCTGG | |
| | AGTCCGAGTTCGTGTACGGCGACTACAAGGTGTACGACGTGCGGAAGATGATCGCCAAGTCCGAGCAGGAGATCGGCAAGGCCACC | |
| | GCCAAGTACTTCTTCTACTCCAACATCATGAACTTCTTCAAGACCGAGATCACCCTGGCCAACGGCGAGATCCGGAAGCGGCCCCT | |
| | GATCGAGACCAACGGCGAGACCGGCGAGATCGTGTGGGACAAGGGCCGGGACTTCGCCACCGTGCGGAAGGTGCTGTCCATGCCCC | |
| | AGGTGAACATCGTGAAGAAGACCGAGGTGCAGACCGGCGGCTTCTCCAAGGAGTCCATCCTGCCCAAGCGGAACTCCGACAAGCTG | |
| | ATCGCCCGGAAGAAGGACTGGGACCCCAAGAAGTACGGCGGCTTCGACTCCCCCACCGTGGCCTACTCCGTGCTGGTGGTGGCCAA | |
| | GGTGGAGAAGGGCAAGTCCAAGAAGCTGAAGTCCGTGAAGGAGCTGCTGGGCATCACCATCATGGAGCGGTCCTCCTTCGAGAAGA | |
| | ACCCCATCGACTTCCTGGAGGCCAAGGGCTACAAGGAGGTGAAGAAGGACCTGATCATCAAGCTGCCCAAGTACTCCCTGTTCGAG | |
| | CTGGAGAACGGCCGGAAGCGGATGCTGGCCTCCGCCGGCGAGCTGCAGAAGGGCAACGAGCTGGCCCTGCCCTCCAAGTACGTGAA | |
| | CTTCCTGTACCTGGCCTCCCACTACGAGAAGCTGAAGGGCTCCCCCGAGGACAACGAGCAGAAGCAGCTGTTCGTGGAGCAGCACA | |
| | AGCACTACCTGGACGAGATCATCGAGCAGATCTCCGAGTTCTCCAAGCGGGTGATCCTGGCCGACGCCAACCTGGACAAGGTGCTG | |
| | TCCGCCTACAACAAGCACCGGGACAAGCCCATCCGGGAGCAGGCCGAGAACATCATCCACCTGTTCACCCTGACCAACCTGGGCGC | |
| | CCCCGCCGCCTTCAAGTACTTCGACACCACCATCGACCGGAAGCGGTACACCTCCACCAAGGAGGTGCTGGACGCCACCCTGATCC | |
| | ACCAGTCCATCACCGGCCTGTACGAGACCCGGATCGACCTGTCCCAGCTGGGCGGCGACGGCGGCGGCTCCCCCAAGAAGAAGCGG | |
| | AAGGTG | |
| Cas9 ORF | GACAAGAAGTACAGCATCGGCCTGGACATCGGCACCAACAGCGTGGGCTGGGCCGTGATCACCGACGAGTACAAGGTGCCCAGCAA | 347 |
| using low | GAAGTTCAAGGTGCTGGGCAACACCGACCGGCACAGCATCAAGAAGAACCTGATCGGCGCCCTGCTGTTCGACAGCGGCGAGACCG | |
| A/U codons | CCGAGGCCACCCGGCTGAAGCGGACCGCCCGGCGGCGGTACACCCGGCGGAAGAACCGGATCTGCTACCTGCAGGAGATCTTCAGC | |
| of Table 4 | AACGAGATGGCCAAGGTGGACGACAGCTTCTTCCACCGGCTGGAGGAGAGCTTCCTGGTGGAGGAGGACAAGAAGCACGAGCGGCA | |
| (no start or | CCCCATCTTCGGCAACATCGTGGACGAGGTGGCCTACCACGAGAAGTACCCCACCATCTACCACCTGCGGAAGAAGCTGGTGGACA | |
| stop codons; | GCACCGACAAGGCCGACCTGCGGCTGATCTACCTGGCCCTGGCCCACATGATCAAGTTCCGGGGCCACTTCCTGATCGAGGGCGAC | |
| suitable for | CTGAACCCCGACAACAGCGACGTGGACAAGCTGTTCATCCAGCTGGTGCAGACCTACAACCAGCTGTTCGAGGAGAACCCCATCAA | |
| inclusion in | CGCCAGCGGCGTGGACGCCAAGGCCATCCTGAGCGCCCGGCTGAGCAAGAGCCGGCGGCTGGAGAACCTGATCGCCCAGCTGCCCG | |
| fusion | GCGAGAAGAAGAACGGCCTGTTCGGCAACCTGATCGCCCTGAGCCTGGGCCTGACCCCCAACTTCAAGAGCAACTTCGACCTGGCC | |
| protein | GAGGACGCCAAGCTGCAGCTGAGCAAGGACACCTACGACGACGACCTGGACAACCTGCTGGCCCAGATCGGCGACCAGTACGCCGA | |
| coding | CCTGTTCCTGGCCGCCAAGAACCTGAGCGACGCCATCCTGCTGAGCGACATCCTGCGGGTGAACACCGAGATCACCAAGGCCCCCC | |
| sequence) | TGAGCGCCAGCATGATCAAGCGGTACGACGAGCACCACCAGGACCTGACCCTGCTGAAGGCCCTGGTGCGGCAGCAGCTGCCCGAG | |
| | AAGTACAAGGAGATCTTCTTCGACCAGAGCAAGAACGGCTACGCCGGCTACATCGACGGCGGCGCCAGCCAGGAGGAGTTCTACAA | |
| | GTTCATCAAGCCCATCCTGGAGAAGATGGACGGCACCGAGGAGCTGCTGGTGAAGCTGAACCGGGAGGACCTGCTGCGGAAGCAGC | |
| | GGACCTTCGACAACGGCAGCATCCCCCACCAGATCCACCTGGGCGAGCTGCACGCCATCCTGCGGCGGCAGGAGGACTTCTACCCC | |
| | TTCCTGAAGGACAACCGGGAGAAGATCGAGAAGATCCTGACCTTCCGGATCCCCTACTACGTGGGCCCCCTGGCCCGGGGCAACAG | |
| | CCGGTTCGCCTGGATGACCCGGAAGAGCGAGGAGACCATCACCCCCTGGAACTTCGAGGAGGTGGTGGACAAGGGCGCCAGCGCCC | |
| | AGAGCTTCATCGAGCGGATGACCAACTTCGACAAGAACCTGCCCAACGAGAAGGTGCTGCCCAAGCACAGCCTGCTGTACGAGTAC | |
| | TTCACCGTGTACAACGAGCTGACCAAGGTGAAGTACGTGACCGAGGGCATGCGGAAGCCCGCCTTCCTGAGCGGCGAGCAGAAGAA | |
| | GGCCATCGTGGACCTGCTGTTCAAGACCAACCGGAAGGTGACCGTGAAGCAGCTGAAGGAGGACTACTTCAAGAAGATCGAGTGCT | |
| | TCGACAGCGTGGAGATCAGCGGCGTGGAGGACCGGTTCAACGCCAGCCTGGGCACCTACCACGACCTGCTGAAGATCATCAAGGAC | |
| | AAGGACTTCCTGGACAACGAGGAGAACGAGGACATCCTGGAGGACATCGTGCTGACCCTGACCCTGTTCGAGGACCGGGAGATGAT | |
| | CGAGGAGCGGCTGAAGACCTACGCCCACCTGTTCGACGACAAGGTGATGAAGCAGCTGAAGCGGCGGCGGTACACCGGCTGGGGCC | |
| | GGCTGAGCCGGAAGCTGATCAACGGCATCCGGGACAAGCAGAGCGGCAAGACCATCCTGGACTTCCTGAAGAGCGACGGCTTCGCC | |
| | AACCGGAACTTCATGCAGCTGATCCACGACGACAGCCTGACCTTCAAGGAGGACATCCAGAAGGCCCAGGTGAGCGGCCAGGGCGA | |
| | CAGCCTGCACGAGCACATCGCCAACCTGGCCGGCAGCCCCGCCATCAAGAAGGGCATCCTGCAGACCGTGAAGGTGGTGGACGAGC | |
| | TGGTGAAGGTGATGGGCCGGCACAAGCCCGAGAACATCGTGATCGAGATGGCCCGGGAGAACCAGACCACCCAGAAGGGCCAGAAG | |
| | AACAGCCGGGAGCGGATGAAGCGGATCGAGGAGGGCATCAAGGAGCTGGGCAGCCAGATCCTGAAGGAGCACCCCGTGGAGAACAC | |
| | CCAGCTGCAGAACGAGAAGCTGTACCTGTACTACCTGCAGAACGGCCGGGACATGTACGTGGACCAGGAGCTGGACATCAACCGGC | |
| | TGAGCGACTACGACGTGGACCACATCGTGCCCCAGAGCTTCCTGAAGGACGACAGCATCGACAACAAGGTGCTGACCCGGAGCGAC | |
| | AAGAACCGGGGCAAGAGCGACAACGTGCCCAGCGAGGAGGTGGTGAAGAAGATGAAGAACTACTGGCGGCAGCTGCTGAACGCCAA | |
| | GCTGATCACCCAGCGGAAGTTCGACAACCTGACCAAGGCCGAGCGGGGCGGCCTGAGCGAGCTGGACAAGGCCGGCTTCATCAAGC | |
| | GGCAGCTGGTGGAGACCCGGCAGATCACCAAGCACGTGGCCCAGATCCTGGACAGCCGGATGAACACCAAGTACGACGAGAACGAC | |
| | AAGCTGATCCGGGAGGTGAAGGTGATCACCCTGAAGAGCAAGCTGGTGAGCGACTTCCGGAAGGACTTCCAGTTCTACAAGGTGCG | |
| | GGAGATCAACAACTACCACCACGCCCACGACGCCTACCTGAACGCCGTGGTGGGCACCGCCCTGATCAAGAAGTACCCCAAGCTGG | |
| | AGAGCGAGTTCGTGTACGGCGACTACAAGGTGTACGACGTGCGGAAGATGATCGCCAAGAGCGAGCAGGAGATCGGCAAGGCCACC | |
| | GCCAAGTACTTCTTCTACAGCAACATCATGAACTTCTTCAAGACCGAGATCACCCTGGCCAACGGCGAGATCCGGAAGCGGCCCCT | |
| | GATCGAGACCAACGGCGAGACCGGCGAGATCGTGTGGGACAAGGGCCGGGACTTCGCCACCGTGCGGAAGGTGCTGAGCATGCCCC | |
| | AGGTGAACATCGTGAAGAAGACCGAGGTGCAGACCGGCGGCTTCAGCAAGGAGAGCATCCTGCCCAAGCGGAACAGCGACAAGCTG | |
| | ATCGCCCGGAAGAAGGACTGGGACCCCAAGAAGTACGGCGGCTTCGACAGCCCCACCGTGGCCTACAGCGTGCTGGTGGTGGCCAA | |
| | GGTGGAGAAGGGCAAGAGCAAGAAGCTGAAGAGCGTGAAGGAGCTGCTGGGCATCACCATCATGGAGCGGAGCAGCTTCGAGAAGA | |
| | ACCCCATCGACTTCCTGGAGGCCAAGGGCTACAAGGAGGTGAAGAAGGACCTGATCATCAAGCTGCCCAAGTACAGCCTGTTCGAG | |
| | CTGGAGAACGGCCGGAAGCGGATGCTGGCCAGCGCCGGCGAGCTGCAGAAGGGCAACGAGCTGGCCCTGCCCAGCAAGTACGTGAA | |
| | CTTCCTGTACCTGGCCAGCCACTACGAGAAGCTGAAGGGCAGCCCCGAGGACAACGAGCAGAAGCAGCTGTTCGTGGAGCAGCACA | |
| | AGCACTACCTGGACGAGATCATCGAGCAGATCAGCGAGTTCAGCAAGCGGGTGATCCTGGCCGACGCCAACCTGGACAAGGTGCTG | |
| | AGCGCCTACAACAAGCACCGGGACAAGCCCATCCGGGAGCAGGCCGAGAACATCATCCACCTGTTCACCCTGACCAACCTGGGCGC | |
| | CCCCGCCGCCTTCAAGTACTTCGACACCACCATCGACCGGAAGCGGTACACCAGCACCAAGGAGGTGCTGGACGCCACCCTGATCC | |
| | ACCAGAGCATCACCGGCCTGTACGAGACCCGGATCGACCTGAGCCAGCTGGGCGGCGACGGCGGCGGCAGCCCCAAGAAGAAGCGG | |
| | AAGGTG | |
| Cas9 ORF | GACAAGAAGTACTCCATCGGCCTGGACATCGGCACCAACTCCGTGGGCTGGGCCGTGATCACCGACGAGTACAAGGTGCCCTCCAA | 348 |
| using low A | GAAGTTCAAGGTGCTGGGCAACACCGACCGGCACTCCATCAAGAAGAACCTGATCGGCGCCCTGCTGTTCGACTCCGGCGAGACCG | |
| codons of | CCGAGGCCACCCGGCTGAAGCGGACCGCCCGGCGGCGGTACACCCGGCGGAAGAACCGGATCTGCTACCTGCAGGAGATCTTCTCC | |
| Table 4, | AACGAGATGGCCAAGGTGGACGACTCCTTCTTCCACCGGCTGGAGGAGTCCTTCCTGGTGGAGGAGGACAAGAAGCACGAGCGGCA | |
| with two C- | CCCCATCTTCGGCAACATCGTGGACGAGGTGGCCTACCACGAGAAGTACCCCACCATCTACCACCTGCGGAAGAAGCTGGTGGACT | |
| terminal NLS | CCACCGACAAGGCCGACCTGCGGCTGATCTACCTGGCCCTGGCCCACATGATCAAGTTCCGGGGCCACTTCCTGATCGAGGGCGAC | |
| sequences | CTGAACCCCGACAACTCCGACGTGGACAAGCTGTTCATCCAGCTGGTGCAGACCTACAACCAGCTGTTCGAGGAGAACCCCATCAA | |
| (no start or | CGCCTCCGGCGTGGACGCCAAGGCCATCCTGTCCGCCCGGCTGTCCAAGTCCCGGCGGCTGGAGAACCTGATCGCCCAGCTGCCCG | |
| stop codons; | GCGAGAAGAAGAACGGCCTGTTCGGCAACCTGATCGCCCTGTCCCTGGGCCTGACCCCCAACTTCAAGTCCAACTTCGACCTGGCC | |
| suitable for | GAGGACGCCAAGCTGCAGCTGTCCAAGGACACCTACGACGACGACCTGGACAACCTGCTGGCCCAGATCGGCGACCAGTACGCCGA | |
| inclusion in | CCTGTTCCTGGCCGCCAAGAACCTGTCCGACGCCATCCTGCTGTCCGACATCCTGCGGGTGAACACCGAGATCACCAAGGCCCCCC | |
| fusion | TGTCCGCCTCCATGATCAAGCGGTACGACGAGCACCACCAGGACCTGACCCTGCTGAAGGCCCTGGTGCGGCAGCAGCTGCCCGAG | |
| protein | AAGTACAAGGAGATCTTCTTCGACCAGTCCAAGAACGGCTACGCCGGCTACATCGACGGCGGCGCCTCCCAGGAGGAGTTCTACAA | |
| coding | GTTCATCAAGCCCATCCTGGAGAAGATGGACGGCACCGAGGAGCTGCTGGTGAAGCTGAACCGGGAGGACCTGCTGCGGAAGCAGC | |
| sequence) | GGACCTTCGACAACGGCTCCATCCCCCACCAGATCCACCTGGGCGAGCTGCACGCCATCCTGCGGCGGCAGGAGGACTTCTACCCC | |
| | TTCCTGAAGGACAACCGGGAGAAGATCGAGAAGATCCTGACCTTCCGGATCCCCTACTACGTGGGCCCCCTGGCCCGGGGCAACTC | |
| | CCGGTTCGCCTGGATGACCCGGAAGTCCGAGGAGACCATCACCCCCTGGAACTTCGAGGAGGTGGTGGACAAGGGCGCCTCCGCCC | |
| | AGTCCTTCATCGAGCGGATGACCAACTTCGACAAGAACCTGCCCAACGAGAAGGTGCTGCCCAAGCACTCCCTGCTGTACGAGTAC | |
| | TTCACCGTGTACAACGAGCTGACCAAGGTGAAGTACGTGACCGAGGGCATGCGGAAGCCCGCCTTCCTGTCCGGCGAGCAGAAGAA | |
| | GGCCATCGTGGACCTGCTGTTCAAGACCAACCGGAAGGTGACCGTGAAGCAGCTGAAGGAGGACTACTTCAAGAAGATCGAGTGCT | |
| | TCGACTCCGTGGAGATCTCCGGCGTGGAGGACCGGTTCAACGCCTCCCTGGGCACCTACCACGACCTGCTGAAGATCATCAAGGAC | |
| | AAGGACTTCCTGGACAACGAGGAGAACGAGGACATCCTGGAGGACATCGTGCTGACCCTGACCCTGTTCGAGGACCGGGAGATGAT | |
| | CGAGGAGCGGCTGAAGACCTACGCCCACCTGTTCGACGACAAGGTGATGAAGCAGCTGAAGCGGCGGCGGTACACCGGCTGGGGCC | |
| | GGCTGTCCCGGAAGCTGATCAACGGCATCCGGGACAAGCAGTCCGGCAAGACCATCCTGGACTTCCTGAAGTCCGACGGCTTCGCC | |
| | AACCGGAACTTCATGCAGCTGATCCACGACGACTCCCTGACCTTCAAGGAGGACATCCAGAAGGCCCAGGTGTCCGGCCAGGGCGA | |
| | CTCCCTGCACGAGCACATCGCCAACCTGGCCGGCTCCCCCGCCATCAAGAAGGGCATCCTGCAGACCGTGAAGGTGGTGGACGAGC | |
| | TGGTGAAGGTGATGGGCCGGCACAAGCCCGAGAACATCGTGATCGAGATGGCCCGGGAGAACCAGACCACCCAGAAGGGCCAGAAG | |
| | AACTCCCGGGAGCGGATGAAGCGGATCGAGGAGGGCATCAAGGAGCTGGGCTCCCAGATCCTGAAGGAGCACCCCGTGGAGAACAC | |
| | CCAGCTGCAGAACGAGAAGCTGTACCTGTACTACCTGCAGAACGGCCGGGACATGTACGTGGACCAGGAGCTGGACATCAACCGGC | |
| | TGTCCGACTACGACGTGGACCACATCGTGCCCCAGTCCTTCCTGAAGGACGACTCCATCGACAACAAGGTGCTGACCCGGTCCGAC | |
| | AAGAACCGGGGCAAGTCCGACAACGTGCCCTCCGAGGAGGTGGTGAAGAAGATGAAGAACTACTGGCGGCAGCTGCTGAACGCCAA | |
| | GCTGATCACCCAGCGGAAGTTCGACAACCTGACCAAGGCCGAGCGGGGCGGCCTGTCCGAGCTGGACAAGGCCGGCTTCATCAAGC | |
| | GGCAGCTGGTGGAGACCCGGCAGATCACCAAGCACGTGGCCCAGATCCTGGACTCCCGGATGAACACCAAGTACGACGAGAACGAC | |
| | AAGCTGATCCGGGAGGTGAAGGTGATCACCCTGAAGTCCAAGCTGGTGTCCGACTTCCGGAAGGACTTCCAGTTCTACAAGGTGCG | |
| | GGAGATCAACAACTACCACCACGCCCACGACGCCTACCTGAACGCCGTGGTGGGCACCGCCCTGATCAAGAAGTACCCCAAGCTGG | |
| | AGTCCGAGTTCGTGTACGGCGACTACAAGGTGTACGACGTGCGGAAGATGATCGCCAAGTCCGAGCAGGAGATCGGCAAGGCCACC | |
| | GCCAAGTACTTCTTCTACTCCAACATCATGAACTTCTTCAAGACCGAGATCACCCTGGCCAACGGCGAGATCCGGAAGCGGCCCCT | |
| | GATCGAGACCAACGGCGAGACCGGCGAGATCGTGTGGGACAAGGGCCGGGACTTCGCCACCGTGCGGAAGGTGCTGTCCATGCCCC | |
| | AGGTGAACATCGTGAAGAAGACCGAGGTGCAGACCGGCGGCTTCTCCAAGGAGTCCATCCTGCCCAAGCGGAACTCCGACAAGCTG | |
| | ATCGCCCGGAAGAAGGACTGGGACCCCAAGAAGTACGGCGGCTTCGACTCCCCCACCGTGGCCTACTCCGTGCTGGTGGTGGCCAA | |
| | GGTGGAGAAGGGCAAGTCCAAGAAGCTGAAGTCCGTGAAGGAGCTGCTGGGCATCACCATCATGGAGCGGTCCTCCTTCGAGAAGA | |
| | ACCCCATCGACTTCCTGGAGGCCAAGGGCTACAAGGAGGTGAAGAAGGACCTGATCATCAAGCTGCCCAAGTACTCCCTGTTCGAG | |
| | CTGGAGAACGGCCGGAAGCGGATGCTGGCCTCCGCCGGCGAGCTGCAGAAGGGCAACGAGCTGGCCCTGCCCTCCAAGTACGTGAA | |
| | CTTCCTGTACCTGGCCTCCCACTACGAGAAGCTGAAGGGCTCCCCCGAGGACAACGAGCAGAAGCAGCTGTTCGTGGAGCAGCACA | |
| | AGCACTACCTGGACGAGATCATCGAGCAGATCTCCGAGTTCTCCAAGCGGGTGATCCTGGCCGACGCCAACCTGGACAAGGTGCTG | |
| | TCCGCCTACAACAAGCACCGGGACAAGCCCATCCGGGAGCAGGCCGAGAACATCATCCACCTGTTCACCCTGACCAACCTGGGCGC | |
| | CCCCGCCGCCTTCAAGTACTTCGACACCACCATCGACCGGAAGCGGTACACCTCCACCAAGGAGGTGCTGGACGCCACCCTGATCC | |
| | ACCAGTCCATCACCGGCCTGTACGAGACCCGGATCGACCTGTCCCAGCTGGGCGGCGACGGCTCCGGCTCCCCCAAGAAGAAGCGG | |
| | AAGGTGGACGGCTCCCCCAAGAAGAAGCGGAAGGTGGACTCCGGC | |
| Cas9 nickase | GACAAGAAGTACTCCATCGGCCTGGCCATCGGCACCAACTCCGTGGGCTGGGCCGTGATCACCGACGAGTACAAGGTGCCCTCCAA | 349 |
| ORF using | GAAGTTCAAGGTGCTGGGCAACACCGACCGGCACTCCATCAAGAAGAACCTGATCGGCGCCCTGCTGTTCGACTCCGGCGAGACCG | |
| low A codons | CCGAGGCCACCCGGCTGAAGCGGACCGCCCGGCGGCGGTACACCCGGCGGAAGAACCGGATCTGCTACCTGCAGGAGATCTTCTCC | |
| of Table 4 | AACGAGATGGCCAAGGTGGACGACTCCTTCTTCCACCGGCTGGAGGAGTCCTTCCTGGTGGAGGAGGACAAGAAGCACGAGCGGCA | |
| (no start or | CCCCATCTTCGGCAACATCGTGGACGAGGTGGCCTACCACGAGAAGTACCCCACCATCTACCACCTGCGGAAGAAGCTGGTGGACT | |
| stop codons; | CCACCGACAAGGCCGACCTGCGGCTGATCTACCTGGCCCTGGCCCACATGATCAAGTTCCGGGGCCACTTCCTGATCGAGGGCGAC | |
| suitable for | CTGAACCCCGACAACTCCGACGTGGACAAGCTGTTCATCCAGCTGGTGCAGACCTACAACCAGCTGTTCGAGGAGAACCCCATCAA | |
| inclusion in | CGCCTCCGGCGTGGACGCCAAGGCCATCCTGTCCGCCCGGCTGTCCAAGTCCCGGCGGCTGGAGAACCTGATCGCCCAGCTGCCCG | |
| fusion | GCGAGAAGAAGAACGGCCTGTTCGGCAACCTGATCGCCCTGTCCCTGGGCCTGACCCCCAACTTCAAGTCCAACTTCGACCTGGCC | |
| protein | GAGGACGCCAAGCTGCAGCTGTCCAAGGACACCTACGACGACGACCTGGACAACCTGCTGGCCCAGATCGGCGACCAGTACGCCGA | |
| coding | CCTGTTCCTGGCCGCCAAGAACCTGTCCGACGCCATCCTGCTGTCCGACATCCTGCGGGTGAACACCGAGATCACCAAGGCCCCCC | |
| sequence) | TGTCCGCCTCCATGATCAAGCGGTACGACGAGCACCACCAGGACCTGACCCTGCTGAAGGCCCTGGTGCGGCAGCAGCTGCCCGAG | |
| | AAGTACAAGGAGATCTTCTTCGACCAGTCCAAGAACGGCTACGCCGGCTACATCGACGGCGGCGCCTCCCAGGAGGAGTTCTACAA | |
| | GTTCATCAAGCCCATCCTGGAGAAGATGGACGGCACCGAGGAGCTGCTGGTGAAGCTGAACCGGGAGGACCTGCTGCGGAAGCAGC | |
| | GGACCTTCGACAACGGCTCCATCCCCCACCAGATCCACCTGGGCGAGCTGCACGCCATCCTGCGGCGGCAGGAGGACTTCTACCCC | |
| | TTCCTGAAGGACAACCGGGAGAAGATCGAGAAGATCCTGACCTTCCGGATCCCCTACTACGTGGGCCCCCTGGCCCGGGGCAACTC | |
| | CCGGTTCGCCTGGATGACCCGGAAGTCCGAGGAGACCATCACCCCCTGGAACTTCGAGGAGGTGGTGGACAAGGGCGCCTCCGCCC | |
| | AGTCCTTCATCGAGCGGATGACCAACTTCGACAAGAACCTGCCCAACGAGAAGGTGCTGCCCAAGCACTCCCTGCTGTACGAGTAC | |
| | TTCACCGTGTACAACGAGCTGACCAAGGTGAAGTACGTGACCGAGGGCATGCGGAAGCCCGCCTTCCTGTCCGGCGAGCAGAAGAA | |
| | GGCCATCGTGGACCTGCTGTTCAAGACCAACCGGAAGGTGACCGTGAAGCAGCTGAAGGAGGACTACTTCAAGAAGATCGAGTGCT | |
| | TCGACTCCGTGGAGATCTCCGGCGTGGAGGACCGGTTCAACGCCTCCCTGGGCACCTACCACGACCTGCTGAAGATCATCAAGGAC | |
| | AAGGACTTCCTGGACAACGAGGAGAACGAGGACATCCTGGAGGACATCGTGCTGACCCTGACCCTGTTCGAGGACCGGGAGATGAT | |
| | CGAGGAGCGGCTGAAGACCTACGCCCACCTGTTCGACGACAAGGTGATGAAGCAGCTGAAGCGGCGGCGGTACACCGGCTGGGGCC | |
| | GGCTGTCCCGGAAGCTGATCAACGGCATCCGGGACAAGCAGTCCGGCAAGACCATCCTGGACTTCCTGAAGTCCGACGGCTTCGCC | |
| | AACCGGAACTTCATGCAGCTGATCCACGACGACTCCCTGACCTTCAAGGAGGACATCCAGAAGGCCCAGGTGTCCGGCCAGGGCGA | |
| | CTCCCTGCACGAGCACATCGCCAACCTGGCCGGCTCCCCCGCCATCAAGAAGGGCATCCTGCAGACCGTGAAGGTGGTGGACGAGC | |
| | TGGTGAAGGTGATGGGCCGGCACAAGCCCGAGAACATCGTGATCGAGATGGCCCGGGAGAACCAGACCACCCAGAAGGGCCAGAAG | |
| | AACTCCCGGGAGCGGATGAAGCGGATCGAGGAGGGCATCAAGGAGCTGGGCTCCCAGATCCTGAAGGAGCACCCCGTGGAGAACAC | |
| | CCAGCTGCAGAACGAGAAGCTGTACCTGTACTACCTGCAGAACGGCCGGGACATGTACGTGGACCAGGAGCTGGACATCAACCGGC | |
| | TGTCCGACTACGACGTGGACCACATCGTGCCCCAGTCCTTCCTGAAGGACGACTCCATCGACAACAAGGTGCTGACCCGGTCCGAC | |
| | AAGAACCGGGGCAAGTCCGACAACGTGCCCTCCGAGGAGGTGGTGAAGAAGATGAAGAACTACTGGCGGCAGCTGCTGAACGCCAA | |
| | GCTGATCACCCAGCGGAAGTTCGACAACCTGACCAAGGCCGAGCGGGGCGGCCTGTCCGAGCTGGACAAGGCCGGCTTCATCAAGC | |
| | GGCAGCTGGTGGAGACCCGGCAGATCACCAAGCACGTGGCCCAGATCCTGGACTCCCGGATGAACACCAAGTACGACGAGAACGAC | |
| | AAGCTGATCCGGGAGGTGAAGGTGATCACCCTGAAGTCCAAGCTGGTGTCCGACTTCCGGAAGGACTTCCAGTTCTACAAGGTGCG | |
| | GGAGATCAACAACTACCACCACGCCCACGACGCCTACCTGAACGCCGTGGTGGGCACCGCCCTGATCAAGAAGTACCCCAAGCTGG | |
| | AGTCCGAGTTCGTGTACGGCGACTACAAGGTGTACGACGTGCGGAAGATGATCGCCAAGTCCGAGCAGGAGATCGGCAAGGCCACC | |
| | GCCAAGTACTTCTTCTACTCCAACATCATGAACTTCTTCAAGACCGAGATCACCCTGGCCAACGGCGAGATCCGGAAGCGGCCCCT | |
| | GATCGAGACCAACGGCGAGACCGGCGAGATCGTGTGGGACAAGGGCCGGGACTTCGCCACCGTGCGGAAGGTGCTGTCCATGCCCC | |
| | AGGTGAACATCGTGAAGAAGACCGAGGTGCAGACCGGCGGCTTCTCCAAGGAGTCCATCCTGCCCAAGCGGAACTCCGACAAGCTG | |
| | ATCGCCCGGAAGAAGGACTGGGACCCCAAGAAGTACGGCGGCTTCGACTCCCCCACCGTGGCCTACTCCGTGCTGGTGGTGGCCAA | |
| | GGTGGAGAAGGGCAAGTCCAAGAAGCTGAAGTCCGTGAAGGAGCTGCTGGGCATCACCATCATGGAGCGGTCCTCCTTCGAGAAGA | |
| | ACCCCATCGACTTCCTGGAGGCCAAGGGCTACAAGGAGGTGAAGAAGGACCTGATCATCAAGCTGCCCAAGTACTCCCTGTTCGAG | |
| | CTGGAGAACGGCCGGAAGCGGATGCTGGCCTCCGCCGGCGAGCTGCAGAAGGGCAACGAGCTGGCCCTGCCCTCCAAGTACGTGAA | |
| | CTTCCTGTACCTGGCCTCCCACTACGAGAAGCTGAAGGGCTCCCCCGAGGACAACGAGCAGAAGCAGCTGTTCGTGGAGCAGCACA | |
| | AGCACTACCTGGACGAGATCATCGAGCAGATCTCCGAGTTCTCCAAGCGGGTGATCCTGGCCGACGCCAACCTGGACAAGGTGCTG | |
| | TCCGCCTACAACAAGCACCGGGACAAGCCCATCCGGGAGCAGGCCGAGAACATCATCCACCTGTTCACCCTGACCAACCTGGGCGC | |
| | CCCCGCCGCCTTCAAGTACTTCGACACCACCATCGACCGGAAGCGGTACACCTCCACCAAGGAGGTGCTGGACGCCACCCTGATCC | |
| | ACCAGTCCATCACCGGCCTGTACGAGACCCGGATCGACCTGTCCCAGCTGGGCGGCGACGGCGGCGGCTCCCCCAAGAAGAAGCGG | |
| | AAGGTG | |
| Cas9 nickase | GACAAGAAGTACTCCATCGGCCTGGCCATCGGCACCAACTCCGTGGGCTGGGCCGTGATCACCGACGAGTACAAGGTGCCCTCCAA | 350 |
| ORF using | GAAGTTCAAGGTGCTGGGCAACACCGACCGGCACTCCATCAAGAAGAACCTGATCGGCGCCCTGCTGTTCGACTCCGGCGAGACCG | |
| low A codons | CCGAGGCCACCCGGCTGAAGCGGACCGCCCGGCGGCGGTACACCCGGCGGAAGAACCGGATCTGCTACCTGCAGGAGATCTTCTCC | |
| of Table 4 | AACGAGATGGCCAAGGTGGACGACTCCTTCTTCCACCGGCTGGAGGAGTCCTTCCTGGTGGAGGAGGACAAGAAGCACGAGCGGCA | |
| (no NLS and | CCCCATCTTCGGCAACATCGTGGACGAGGTGGCCTACCACGAGAAGTACCCCACCATCTACCACCTGCGGAAGAAGCTGGTGGACT | |
| no start or | CCACCGACAAGGCCGACCTGCGGCTGATCTACCTGGCCCTGGCCCACATGATCAAGTTCCGGGGCCACTTCCTGATCGAGGGCGAC | |
| stop codons; | CTGAACCCCGACAACTCCGACGTGGACAAGCTGTTCATCCAGCTGGTGCAGACCTACAACCAGCTGTTCGAGGAGAACCCCATCAA | |
| suitable for | CGCCTCCGGCGTGGACGCCAAGGCCATCCTGTCCGCCCGGCTGTCCAAGTCCCGGCGGCTGGAGAACCTGATCGCCCAGCTGCCCG | |
| inclusion in | GCGAGAAGAAGAACGGCCTGTTCGGCAACCTGATCGCCCTGTCCCTGGGCCTGACCCCCAACTTCAAGTCCAACTTCGACCTGGCC | |
| fusion | GAGGACGCCAAGCTGCAGCTGTCCAAGGACACCTACGACGACGACCTGGACAACCTGCTGGCCCAGATCGGCGACCAGTACGCCGA | |
| protein | CCTGTTCCTGGCCGCCAAGAACCTGTCCGACGCCATCCTGCTGTCCGACATCCTGCGGGTGAACACCGAGATCACCAAGGCCCCCC | |
| coding | TGTCCGCCTCCATGATCAAGCGGTACGACGAGCACCACCAGGACCTGACCCTGCTGAAGGCCCTGGTGCGGCAGCAGCTGCCCGAG | |
| sequence) | AAGTACAAGGAGATCTTCTTCGACCAGTCCAAGAACGGCTACGCCGGCTACATCGACGGCGGCGCCTCCCAGGAGGAGTTCTACAA | |
| | GTTCATCAAGCCCATCCTGGAGAAGATGGACGGCACCGAGGAGCTGCTGGTGAAGCTGAACCGGGAGGACCTGCTGCGGAAGCAGC | |
| | GGACCTTCGACAACGGCTCCATCCCCCACCAGATCCACCTGGGCGAGCTGCACGCCATCCTGCGGCGGCAGGAGGACTTCTACCCC | |
| | TTCCTGAAGGACAACCGGGAGAAGATCGAGAAGATCCTGACCTTCCGGATCCCCTACTACGTGGGCCCCCTGGCCCGGGGCAACTC | |
| | CCGGTTCGCCTGGATGACCCGGAAGTCCGAGGAGACCATCACCCCCTGGAACTTCGAGGAGGTGGTGGACAAGGGCGCCTCCGCCC | |
| | AGTCCTTCATCGAGCGGATGACCAACTTCGACAAGAACCTGCCCAACGAGAAGGTGCTGCCCAAGCACTCCCTGCTGTACGAGTAC | |
| | TTCACCGTGTACAACGAGCTGACCAAGGTGAAGTACGTGACCGAGGGCATGCGGAAGCCCGCCTTCCTGTCCGGCGAGCAGAAGAA | |
| | GGCCATCGTGGACCTGCTGTTCAAGACCAACCGGAAGGTGACCGTGAAGCAGCTGAAGGAGGACTACTTCAAGAAGATCGAGTGCT | |
| | TCGACTCCGTGGAGATCTCCGGCGTGGAGGACCGGTTCAACGCCTCCCTGGGCACCTACCACGACCTGCTGAAGATCATCAAGGAC | |
| | AAGGACTTCCTGGACAACGAGGAGAACGAGGACATCCTGGAGGACATCGTGCTGACCCTGACCCTGTTCGAGGACCGGGAGATGAT | |
| | CGAGGAGCGGCTGAAGACCTACGCCCACCTGTTCGACGACAAGGTGATGAAGCAGCTGAAGCGGCGGCGGTACACCGGCTGGGGCC | |
| | GGCTGTCCCGGAAGCTGATCAACGGCATCCGGGACAAGCAGTCCGGCAAGACCATCCTGGACTTCCTGAAGTCCGACGGCTTCGCC | |
| | AACCGGAACTTCATGCAGCTGATCCACGACGACTCCCTGACCTTCAAGGAGGACATCCAGAAGGCCCAGGTGTCCGGCCAGGGCGA | |
| | CTCCCTGCACGAGCACATCGCCAACCTGGCCGGCTCCCCCGCCATCAAGAAGGGCATCCTGCAGACCGTGAAGGTGGTGGACGAGC | |
| | TGGTGAAGGTGATGGGCCGGCACAAGCCCGAGAACATCGTGATCGAGATGGCCCGGGAGAACCAGACCACCCAGAAGGGCCAGAAG | |
| | AACTCCCGGGAGCGGATGAAGCGGATCGAGGAGGGCATCAAGGAGCTGGGCTCCCAGATCCTGAAGGAGCACCCCGTGGAGAACAC | |
| | CCAGCTGCAGAACGAGAAGCTGTACCTGTACTACCTGCAGAACGGCCGGGACATGTACGTGGACCAGGAGCTGGACATCAACCGGC | |
| | TGTCCGACTACGACGTGGACCACATCGTGCCCCAGTCCTTCCTGAAGGACGACTCCATCGACAACAAGGTGCTGACCCGGTCCGAC | |
| | AAGAACCGGGGCAAGTCCGACAACGTGCCCTCCGAGGAGGTGGTGAAGAAGATGAAGAACTACTGGCGGCAGCTGCTGAACGCCAA | |
| | GCTGATCACCCAGCGGAAGTTCGACAACCTGACCAAGGCCGAGCGGGGCGGCCTGTCCGAGCTGGACAAGGCCGGCTTCATCAAGC | |
| | GGCAGCTGGTGGAGACCCGGCAGATCACCAAGCACGTGGCCCAGATCCTGGACTCCCGGATGAACACCAAGTACGACGAGAACGAC | |
| | AAGCTGATCCGGGAGGTGAAGGTGATCACCCTGAAGTCCAAGCTGGTGTCCGACTTCCGGAAGGACTTCCAGTTCTACAAGGTGCG | |
| | GGAGATCAACAACTACCACCACGCCCACGACGCCTACCTGAACGCCGTGGTGGGCACCGCCCTGATCAAGAAGTACCCCAAGCTGG | |
| | AGTCCGAGTTCGTGTACGGCGACTACAAGGTGTACGACGTGCGGAAGATGATCGCCAAGTCCGAGCAGGAGATCGGCAAGGCCACC | |
| | GCCAAGTACTTCTTCTACTCCAACATCATGAACTTCTTCAAGACCGAGATCACCCTGGCCAACGGCGAGATCCGGAAGCGGCCCCT | |
| | GATCGAGACCAACGGCGAGACCGGCGAGATCGTGTGGGACAAGGGCCGGGACTTCGCCACCGTGCGGAAGGTGCTGTCCATGCCCC | |
| | AGGTGAACATCGTGAAGAAGACCGAGGTGCAGACCGGCGGCTTCTCCAAGGAGTCCATCCTGCCCAAGCGGAACTCCGACAAGCTG | |
| | ATCGCCCGGAAGAAGGACTGGGACCCCAAGAAGTACGGCGGCTTCGACTCCCCCACCGTGGCCTACTCCGTGCTGGTGGTGGCCAA | |
| | GGTGGAGAAGGGCAAGTCCAAGAAGCTGAAGTCCGTGAAGGAGCTGCTGGGCATCACCATCATGGAGCGGTCCTCCTTCGAGAAGA | |
| | ACCCCATCGACTTCCTGGAGGCCAAGGGCTACAAGGAGGTGAAGAAGGACCTGATCATCAAGCTGCCCAAGTACTCCCTGTTCGAG | |
| | CTGGAGAACGGCCGGAAGCGGATGCTGGCCTCCGCCGGCGAGCTGCAGAAGGGCAACGAGCTGGCCCTGCCCTCCAAGTACGTGAA | |
| | CTTCCTGTACCTGGCCTCCCACTACGAGAAGCTGAAGGGCTCCCCCGAGGACAACGAGCAGAAGCAGCTGTTCGTGGAGCAGCACA | |
| | AGCACTACCTGGACGAGATCATCGAGCAGATCTCCGAGTTCTCCAAGCGGGTGATCCTGGCCGACGCCAACCTGGACAAGGTGCTG | |
| | TCCGCCTACAACAAGCACCGGGACAAGCCCATCCGGGAGCAGGCCGAGAACATCATCCACCTGTTCACCCTGACCAACCTGGGCGC | |
| | CCCCGCCGCCTTCAAGTACTTCGACACCACCATCGACCGGAAGCGGTACACCTCCACCAAGGAGGTGCTGGACGCCACCCTGATCC | |
| | ACCAGTCCATCACCGGCCTGTACGAGACCCGGATCGACCTGTCCCAGCTGGGCGGCGAC | |
| Cas9 nickase | GACAAGAAGTACTCCATCGGCCTGGCCATCGGCACCAACTCCGTGGGCTGGGCCGTGATCACCGACGAGTACAAGGTGCCCTCCAA | 351 |
| ORF using | GAAGTTCAAGGTGCTGGGCAACACCGACCGGCACTCCATCAAGAAGAACCTGATCGGCGCCCTGCTGTTCGACTCCGGCGAGACCG | |
| low A codons | CCGAGGCCACCCGGCTGAAGCGGACCGCCCGGCGGCGGTACACCCGGCGGAAGAACCGGATCTGCTACCTGCAGGAGATCTTCTCC | |
| of Table 4, | AACGAGATGGCCAAGGTGGACGACTCCTTCTTCCACCGGCTGGAGGAGTCCTTCCTGGTGGAGGAGGACAAGAAGCACGAGCGGCA | |
| with two C- | CCCCATCTTCGGCAACATCGTGGACGAGGTGGCCTACCACGAGAAGTACCCCACCATCTACCACCTGCGGAAGAAGCTGGTGGACT | |
| terminal NLS | CCACCGACAAGGCCGACCTGCGGCTGATCTACCTGGCCCTGGCCCACATGATCAAGTTCCGGGGCCACTTCCTGATCGAGGGCGAC | |
| sequences | CTGAACCCCGACAACTCCGACGTGGACAAGCTGTTCATCCAGCTGGTGCAGACCTACAACCAGCTGTTCGAGGAGAACCCCATCAA | |
| (no start or | CGCCTCCGGCGTGGACGCCAAGGCCATCCTGTCCGCCCGGCTGTCCAAGTCCCGGCGGCTGGAGAACCTGATCGCCCAGCTGCCCG | |
| stop codons; | GCGAGAAGAAGAACGGCCTGTTCGGCAACCTGATCGCCCTGTCCCTGGGCCTGACCCCCAACTTCAAGTCCAACTTCGACCTGGCC | |
| suitable for | GAGGACGCCAAGCTGCAGCTGTCCAAGGACACCTACGACGACGACCTGGACAACCTGCTGGCCCAGATCGGCGACCAGTACGCCGA | |
| inclusion in | CCTGTTCCTGGCCGCCAAGAACCTGTCCGACGCCATCCTGCTGTCCGACATCCTGCGGGTGAACACCGAGATCACCAAGGCCCCCC | |
| fusion | TGTCCGCCTCCATGATCAAGCGGTACGACGAGCACCACCAGGACCTGACCCTGCTGAAGGCCCTGGTGCGGCAGCAGCTGCCCGAG | |
| protein | AAGTACAAGGAGATCTTCTTCGACCAGTCCAAGAACGGCTACGCCGGCTACATCGACGGCGGCGCCTCCCAGGAGGAGTTCTACAA | |
| coding | GTTCATCAAGCCCATCCTGGAGAAGATGGACGGCACCGAGGAGCTGCTGGTGAAGCTGAACCGGGAGGACCTGCTGCGGAAGCAGC | |
| sequence) | GGACCTTCGACAACGGCTCCATCCCCCACCAGATCCACCTGGGCGAGCTGCACGCCATCCTGCGGCGGCAGGAGGACTTCTACCCC | |
| | TTCCTGAAGGACAACCGGGAGAAGATCGAGAAGATCCTGACCTTCCGGATCCCCTACTACGTGGGCCCCCTGGCCCGGGGCAACTC | |
| | CCGGTTCGCCTGGATGACCCGGAAGTCCGAGGAGACCATCACCCCCTGGAACTTCGAGGAGGTGGTGGACAAGGGCGCCTCCGCCC | |
| | AGTCCTTCATCGAGCGGATGACCAACTTCGACAAGAACCTGCCCAACGAGAAGGTGCTGCCCAAGCACTCCCTGCTGTACGAGTAC | |
| | TTCACCGTGTACAACGAGCTGACCAAGGTGAAGTACGTGACCGAGGGCATGCGGAAGCCCGCCTTCCTGTCCGGCGAGCAGAAGAA | |
| | GGCCATCGTGGACCTGCTGTTCAAGACCAACCGGAAGGTGACCGTGAAGCAGCTGAAGGAGGACTACTTCAAGAAGATCGAGTGCT | |
| | TCGACTCCGTGGAGATCTCCGGCGTGGAGGACCGGTTCAACGCCTCCCTGGGCACCTACCACGACCTGCTGAAGATCATCAAGGAC | |
| | AAGGACTTCCTGGACAACGAGGAGAACGAGGACATCCTGGAGGACATCGTGCTGACCCTGACCCTGTTCGAGGACCGGGAGATGAT | |
| | CGAGGAGCGGCTGAAGACCTACGCCCACCTGTTCGACGACAAGGTGATGAAGCAGCTGAAGCGGCGGCGGTACACCGGCTGGGGCC | |
| | GGCTGTCCCGGAAGCTGATCAACGGCATCCGGGACAAGCAGTCCGGCAAGACCATCCTGGACTTCCTGAAGTCCGACGGCTTCGCC | |
| | AACCGGAACTTCATGCAGCTGATCCACGACGACTCCCTGACCTTCAAGGAGGACATCCAGAAGGCCCAGGTGTCCGGCCAGGGCGA | |
| | CTCCCTGCACGAGCACATCGCCAACCTGGCCGGCTCCCCCGCCATCAAGAAGGGCATCCTGCAGACCGTGAAGGTGGTGGACGAGC | |
| | TGGTGAAGGTGATGGGCCGGCACAAGCCCGAGAACATCGTGATCGAGATGGCCCGGGAGAACCAGACCACCCAGAAGGGCCAGAAG | |
| | AACTCCCGGGAGCGGATGAAGCGGATCGAGGAGGGCATCAAGGAGCTGGGCTCCCAGATCCTGAAGGAGCACCCCGTGGAGAACAC | |
| | CCAGCTGCAGAACGAGAAGCTGTACCTGTACTACCTGCAGAACGGCCGGGACATGTACGTGGACCAGGAGCTGGACATCAACCGGC | |
| | TGTCCGACTACGACGTGGACCACATCGTGCCCCAGTCCTTCCTGAAGGACGACTCCATCGACAACAAGGTGCTGACCCGGTCCGAC | |
| | AAGAACCGGGGCAAGTCCGACAACGTGCCCTCCGAGGAGGTGGTGAAGAAGATGAAGAACTACTGGCGGCAGCTGCTGAACGCCAA | |
| | GCTGATCACCCAGCGGAAGTTCGACAACCTGACCAAGGCCGAGCGGGGCGGCCTGTCCGAGCTGGACAAGGCCGGCTTCATCAAGC | |
| | GGCAGCTGGTGGAGACCCGGCAGATCACCAAGCACGTGGCCCAGATCCTGGACTCCCGGATGAACACCAAGTACGACGAGAACGAC | |
| | AAGCTGATCCGGGAGGTGAAGGTGATCACCCTGAAGTCCAAGCTGGTGTCCGACTTCCGGAAGGACTTCCAGTTCTACAAGGTGCG | |
| | GGAGATCAACAACTACCACCACGCCCACGACGCCTACCTGAACGCCGTGGTGGGCACCGCCCTGATCAAGAAGTACCCCAAGCTGG | |
| | AGTCCGAGTTCGTGTACGGCGACTACAAGGTGTACGACGTGCGGAAGATGATCGCCAAGTCCGAGCAGGAGATCGGCAAGGCCACC | |
| | GCCAAGTACTTCTTCTACTCCAACATCATGAACTTCTTCAAGACCGAGATCACCCTGGCCAACGGCGAGATCCGGAAGCGGCCCCT | |
| | GATCGAGACCAACGGCGAGACCGGCGAGATCGTGTGGGACAAGGGCCGGGACTTCGCCACCGTGCGGAAGGTGCTGTCCATGCCCC | |
| | AGGTGAACATCGTGAAGAAGACCGAGGTGCAGACCGGCGGCTTCTCCAAGGAGTCCATCCTGCCCAAGCGGAACTCCGACAAGCTG | |
| | ATCGCCCGGAAGAAGGACTGGGACCCCAAGAAGTACGGCGGCTTCGACTCCCCCACCGTGGCCTACTCCGTGCTGGTGGTGGCCAA | |
| | GGTGGAGAAGGGCAAGTCCAAGAAGCTGAAGTCCGTGAAGGAGCTGCTGGGCATCACCATCATGGAGCGGTCCTCCTTCGAGAAGA | |
| | ACCCCATCGACTTCCTGGAGGCCAAGGGCTACAAGGAGGTGAAGAAGGACCTGATCATCAAGCTGCCCAAGTACTCCCTGTTCGAG | |
| | CTGGAGAACGGCCGGAAGCGGATGCTGGCCTCCGCCGGCGAGCTGCAGAAGGGCAACGAGCTGGCCCTGCCCTCCAAGTACGTGAA | |
| | CTTCCTGTACCTGGCCTCCCACTACGAGAAGCTGAAGGGCTCCCCCGAGGACAACGAGCAGAAGCAGCTGTTCGTGGAGCAGCACA | |
| | AGCACTACCTGGACGAGATCATCGAGCAGATCTCCGAGTTCTCCAAGCGGGTGATCCTGGCCGACGCCAACCTGGACAAGGTGCTG | |
| | TCCGCCTACAACAAGCACCGGGACAAGCCCATCCGGGAGCAGGCCGAGAACATCATCCACCTGTTCACCCTGACCAACCTGGGCGC | |
| | CCCCGCCGCCTTCAAGTACTTCGACACCACCATCGACCGGAAGCGGTACACCTCCACCAAGGAGGTGCTGGACGCCACCCTGATCC | |
| | ACCAGTCCATCACCGGCCTGTACGAGACCCGGATCGACCTGTCCCAGCTGGGCGGCGACGGCTCCGGCTCCCCCAAGAAGAAGCGG | |
| | AAGGTGGACGGCTCCCCCAAGAAGAAGCGGAAGGTGGACTCCGGC | |
| dCas9 ORF | GACAAGAAGTACTCCATCGGCCTGGCCATCGGCACCAACTCCGTGGGCTGGGCCGTGATCACCGACGAGTACAAGGTGCCCTCCAA | 352 |
| using low A | GAAGTTCAAGGTGCTGGGCAACACCGACCGGCACTCCATCAAGAAGAACCTGATCGGCGCCCTGCTGTTCGACTCCGGCGAGACCG | |
| codons of | CCGAGGCCACCCGGCTGAAGCGGACCGCCCGGCGGCGGTACACCCGGCGGAAGAACCGGATCTGCTACCTGCAGGAGATCTTCTCC | |
| Table 4 (no | AACGAGATGGCCAAGGTGGACGACTCCTTCTTCCACCGGCTGGAGGAGTCCTTCCTGGTGGAGGAGGACAAGAAGCACGAGCGGCA | |
| start or | CCCCATCTTCGGCAACATCGTGGACGAGGTGGCCTACCACGAGAAGTACCCCACCATCTACCACCTGCGGAAGAAGCTGGTGGACT | |
| stop codons; | CCACCGACAAGGCCGACCTGCGGCTGATCTACCTGGCCCTGGCCCACATGATCAAGTTCCGGGGCCACTTCCTGATCGAGGGCGAC | |
| suitable for | CTGAACCCCGACAACTCCGACGTGGACAAGCTGTTCATCCAGCTGGTGCAGACCTACAACCAGCTGTTCGAGGAGAACCCCATCAA | |
| inclusion in | CGCCTCCGGCGTGGACGCCAAGGCCATCCTGTCCGCCCGGCTGTCCAAGTCCCGGCGGCTGGAGAACCTGATCGCCCAGCTGCCCG | |
| fusion | GCGAGAAGAAGAACGGCCTGTTCGGCAACCTGATCGCCCTGTCCCTGGGCCTGACCCCCAACTTCAAGTCCAACTTCGACCTGGCC | |
| protein | GAGGACGCCAAGCTGCAGCTGTCCAAGGACACCTACGACGACGACCTGGACAACCTGCTGGCCCAGATCGGCGACCAGTACGCCGA | |
| coding | CCTGTTCCTGGCCGCCAAGAACCTGTCCGACGCCATCCTGCTGTCCGACATCCTGCGGGTGAACACCGAGATCACCAAGGCCCCCC | |
| sequence) | TGTCCGCCTCCATGATCAAGCGGTACGACGAGCACCACCAGGACCTGACCCTGCTGAAGGCCCTGGTGCGGCAGCAGCTGCCCGAG | |
| | AAGTACAAGGAGATCTTCTTCGACCAGTCCAAGAACGGCTACGCCGGCTACATCGACGGCGGCGCCTCCCAGGAGGAGTTCTACAA | |
| | GTTCATCAAGCCCATCCTGGAGAAGATGGACGGCACCGAGGAGCTGCTGGTGAAGCTGAACCGGGAGGACCTGCTGCGGAAGCAGC | |
| | GGACCTTCGACAACGGCTCCATCCCCCACCAGATCCACCTGGGCGAGCTGCACGCCATCCTGCGGCGGCAGGAGGACTTCTACCCC | |
| | TTCCTGAAGGACAACCGGGAGAAGATCGAGAAGATCCTGACCTTCCGGATCCCCTACTACGTGGGCCCCCTGGCCCGGGGCAACTC | |
| | CCGGTTCGCCTGGATGACCCGGAAGTCCGAGGAGACCATCACCCCCTGGAACTTCGAGGAGGTGGTGGACAAGGGCGCCTCCGCCC | |
| | AGTCCTTCATCGAGCGGATGACCAACTTCGACAAGAACCTGCCCAACGAGAAGGTGCTGCCCAAGCACTCCCTGCTGTACGAGTAC | |
| | TTCACCGTGTACAACGAGCTGACCAAGGTGAAGTACGTGACCGAGGGCATGCGGAAGCCCGCCTTCCTGTCCGGCGAGCAGAAGAA | |
| | GGCCATCGTGGACCTGCTGTTCAAGACCAACCGGAAGGTGACCGTGAAGCAGCTGAAGGAGGACTACTTCAAGAAGATCGAGTGCT | |
| | TCGACTCCGTGGAGATCTCCGGCGTGGAGGACCGGTTCAACGCCTCCCTGGGCACCTACCACGACCTGCTGAAGATCATCAAGGAC | |
| | AAGGACTTCCTGGACAACGAGGAGAACGAGGACATCCTGGAGGACATCGTGCTGACCCTGACCCTGTTCGAGGACCGGGAGATGAT | |
| | CGAGGAGCGGCTGAAGACCTACGCCCACCTGTTCGACGACAAGGTGATGAAGCAGCTGAAGCGGCGGCGGTACACCGGCTGGGGCC | |
| | GGCTGTCCCGGAAGCTGATCAACGGCATCCGGGACAAGCAGTCCGGCAAGACCATCCTGGACTTCCTGAAGTCCGACGGCTTCGCC | |
| | AACCGGAACTTCATGCAGCTGATCCACGACGACTCCCTGACCTTCAAGGAGGACATCCAGAAGGCCCAGGTGTCCGGCCAGGGCGA | |
| | CTCCCTGCACGAGCACATCGCCAACCTGGCCGGCTCCCCCGCCATCAAGAAGGGCATCCTGCAGACCGTGAAGGTGGTGGACGAGC | |
| | TGGTGAAGGTGATGGGCCGGCACAAGCCCGAGAACATCGTGATCGAGATGGCCCGGGAGAACCAGACCACCCAGAAGGGCCAGAAG | |
| | AACTCCCGGGAGCGGATGAAGCGGATCGAGGAGGGCATCAAGGAGCTGGGCTCCCAGATCCTGAAGGAGCACCCCGTGGAGAACAC | |
| | CCAGCTGCAGAACGAGAAGCTGTACCTGTACTACCTGCAGAACGGCCGGGACATGTACGTGGACCAGGAGCTGGACATCAACCGGC | |
| | TGTCCGACTACGACGTGGACGCCATCGTGCCCCAGTCCTTCCTGAAGGACGACTCCATCGACAACAAGGTGCTGACCCGGTCCGAC | |
| | AAGAACCGGGGCAAGTCCGACAACGTGCCCTCCGAGGAGGTGGTGAAGAAGATGAAGAACTACTGGCGGCAGCTGCTGAACGCCAA | |
| | GCTGATCACCCAGCGGAAGTTCGACAACCTGACCAAGGCCGAGCGGGGCGGCCTGTCCGAGCTGGACAAGGCCGGCTTCATCAAGC | |
| | GGCAGCTGGTGGAGACCCGGCAGATCACCAAGCACGTGGCCCAGATCCTGGACTCCCGGATGAACACCAAGTACGACGAGAACGAC | |
| | AAGCTGATCCGGGAGGTGAAGGTGATCACCCTGAAGTCCAAGCTGGTGTCCGACTTCCGGAAGGACTTCCAGTTCTACAAGGTGCG | |
| | GGAGATCAACAACTACCACCACGCCCACGACGCCTACCTGAACGCCGTGGTGGGCACCGCCCTGATCAAGAAGTACCCCAAGCTGG | |
| | AGTCCGAGTTCGTGTACGGCGACTACAAGGTGTACGACGTGCGGAAGATGATCGCCAAGTCCGAGCAGGAGATCGGCAAGGCCACC | |
| | GCCAAGTACTTCTTCTACTCCAACATCATGAACTTCTTCAAGACCGAGATCACCCTGGCCAACGGCGAGATCCGGAAGCGGCCCCT | |
| | GATCGAGACCAACGGCGAGACCGGCGAGATCGTGTGGGACAAGGGCCGGGACTTCGCCACCGTGCGGAAGGTGCTGTCCATGCCCC | |
| | AGGTGAACATCGTGAAGAAGACCGAGGTGCAGACCGGCGGCTTCTCCAAGGAGTCCATCCTGCCCAAGCGGAACTCCGACAAGCTG | |
| | ATCGCCCGGAAGAAGGACTGGGACCCCAAGAAGTACGGCGGCTTCGACTCCCCCACCGTGGCCTACTCCGTGCTGGTGGTGGCCAA | |
| | GGTGGAGAAGGGCAAGTCCAAGAAGCTGAAGTCCGTGAAGGAGCTGCTGGGCATCACCATCATGGAGCGGTCCTCCTTCGAGAAGA | |
| | ACCCCATCGACTTCCTGGAGGCCAAGGGCTACAAGGAGGTGAAGAAGGACCTGATCATCAAGCTGCCCAAGTACTCCCTGTTCGAG | |
| | CTGGAGAACGGCCGGAAGCGGATGCTGGCCTCCGCCGGCGAGCTGCAGAAGGGCAACGAGCTGGCCCTGCCCTCCAAGTACGTGAA | |
| | CTTCCTGTACCTGGCCTCCCACTACGAGAAGCTGAAGGGCTCCCCCGAGGACAACGAGCAGAAGCAGCTGTTCGTGGAGCAGCACA | |
| | AGCACTACCTGGACGAGATCATCGAGCAGATCTCCGAGTTCTCCAAGCGGGTGATCCTGGCCGACGCCAACCTGGACAAGGTGCTG | |
| | TCCGCCTACAACAAGCACCGGGACAAGCCCATCCGGGAGCAGGCCGAGAACATCATCCACCTGTTCACCCTGACCAACCTGGGCGC | |
| | CCCCGCCGCCTTCAAGTACTTCGACACCACCATCGACCGGAAGCGGTACACCTCCACCAAGGAGGTGCTGGACGCCACCCTGATCC | |
| | ACCAGTCCATCACCGGCCTGTACGAGACCCGGATCGACCTGTCCCAGCTGGGCGGCGACGGCGGCGGCTCCCCCAAGAAGAAGCGG | |
| | AAGGTG | |
| dCas9 ORF | GACAAGAAGTACTCCATCGGCCTGGCCATCGGCACCAACTCCGTGGGCTGGGCCGTGATCACCGACGAGTACAAGGTGCCCTCCAA | 353 |
| using low A | GAAGTTCAAGGTGCTGGGCAACACCGACCGGCACTCCATCAAGAAGAACCTGATCGGCGCCCTGCTGTTCGACTCCGGCGAGACCG | |
| codons of | CCGAGGCCACCCGGCTGAAGCGGACCGCCCGGCGGCGGTACACCCGGCGGAAGAACCGGATCTGCTACCTGCAGGAGATCTTCTCC | |
| Table 4 (no | AACGAGATGGCCAAGGTGGACGACTCCTTCTTCCACCGGCTGGAGGAGTCCTTCCTGGTGGAGGAGGACAAGAAGCACGAGCGGCA | |
| NLS and no | CCCCATCTTCGGCAACATCGTGGACGAGGTGGCCTACCACGAGAAGTACCCCACCATCTACCACCTGCGGAAGAAGCTGGTGGACT | |
| start or | CCACCGACAAGGCCGACCTGCGGCTGATCTACCTGGCCCTGGCCCACATGATCAAGTTCCGGGGCCACTTCCTGATCGAGGGCGAC | |
| stop codons; | CTGAACCCCGACAACTCCGACGTGGACAAGCTGTTCATCCAGCTGGTGCAGACCTACAACCAGCTGTTCGAGGAGAACCCCATCAA | |
| suitable for | CGCCTCCGGCGTGGACGCCAAGGCCATCCTGTCCGCCCGGCTGTCCAAGTCCCGGCGGCTGGAGAACCTGATCGCCCAGCTGCCCG | |
| inclusion in | GCGAGAAGAAGAACGGCCTGTTCGGCAACCTGATCGCCCTGTCCCTGGGCCTGACCCCCAACTTCAAGTCCAACTTCGACCTGGCC | |
| fusion | GAGGACGCCAAGCTGCAGCTGTCCAAGGACACCTACGACGACGACCTGGACAACCTGCTGGCCCAGATCGGCGACCAGTACGCCGA | |
| protein | CCTGTTCCTGGCCGCCAAGAACCTGTCCGACGCCATCCTGCTGTCCGACATCCTGCGGGTGAACACCGAGATCACCAAGGCCCCCC | |
| coding | TGTCCGCCTCCATGATCAAGCGGTACGACGAGCACCACCAGGACCTGACCCTGCTGAAGGCCCTGGTGCGGCAGCAGCTGCCCGAG | |
| sequence) | AAGTACAAGGAGATCTTCTTCGACCAGTCCAAGAACGGCTACGCCGGCTACATCGACGGCGGCGCCTCCCAGGAGGAGTTCTACAA | |
| | GTTCATCAAGCCCATCCTGGAGAAGATGGACGGCACCGAGGAGCTGCTGGTGAAGCTGAACCGGGAGGACCTGCTGCGGAAGCAGC | |
| | GGACCTTCGACAACGGCTCCATCCCCCACCAGATCCACCTGGGCGAGCTGCACGCCATCCTGCGGCGGCAGGAGGACTTCTACCCC | |
| | TTCCTGAAGGACAACCGGGAGAAGATCGAGAAGATCCTGACCTTCCGGATCCCCTACTACGTGGGCCCCCTGGCCCGGGGCAACTC | |
| | CCGGTTCGCCTGGATGACCCGGAAGTCCGAGGAGACCATCACCCCCTGGAACTTCGAGGAGGTGGTGGACAAGGGCGCCTCCGCCC | |
| | AGTCCTTCATCGAGCGGATGACCAACTTCGACAAGAACCTGCCCAACGAGAAGGTGCTGCCCAAGCACTCCCTGCTGTACGAGTAC | |
| | TTCACCGTGTACAACGAGCTGACCAAGGTGAAGTACGTGACCGAGGGCATGCGGAAGCCCGCCTTCCTGTCCGGCGAGCAGAAGAA | |
| | GGCCATCGTGGACCTGCTGTTCAAGACCAACCGGAAGGTGACCGTGAAGCAGCTGAAGGAGGACTACTTCAAGAAGATCGAGTGCT | |
| | TCGACTCCGTGGAGATCTCCGGCGTGGAGGACCGGTTCAACGCCTCCCTGGGCACCTACCACGACCTGCTGAAGATCATCAAGGAC | |
| | AAGGACTTCCTGGACAACGAGGAGAACGAGGACATCCTGGAGGACATCGTGCTGACCCTGACCCTGTTCGAGGACCGGGAGATGAT | |
| | CGAGGAGCGGCTGAAGACCTACGCCCACCTGTTCGACGACAAGGTGATGAAGCAGCTGAAGCGGCGGCGGTACACCGGCTGGGGCC | |
| | GGCTGTCCCGGAAGCTGATCAACGGCATCCGGGACAAGCAGTCCGGCAAGACCATCCTGGACTTCCTGAAGTCCGACGGCTTCGCC | |
| | AACCGGAACTTCATGCAGCTGATCCACGACGACTCCCTGACCTTCAAGGAGGACATCCAGAAGGCCCAGGTGTCCGGCCAGGGCGA | |
| | CTCCCTGCACGAGCACATCGCCAACCTGGCCGGCTCCCCCGCCATCAAGAAGGGCATCCTGCAGACCGTGAAGGTGGTGGACGAGC | |
| | TGGTGAAGGTGATGGGCCGGCACAAGCCCGAGAACATCGTGATCGAGATGGCCCGGGAGAACCAGACCACCCAGAAGGGCCAGAAG | |
| | AACTCCCGGGAGCGGATGAAGCGGATCGAGGAGGGCATCAAGGAGCTGGGCTCCCAGATCCTGAAGGAGCACCCCGTGGAGAACAC | |
| | CCAGCTGCAGAACGAGAAGCTGTACCTGTACTACCTGCAGAACGGCCGGGACATGTACGTGGACCAGGAGCTGGACATCAACCGGC | |
| | TGTCCGACTACGACGTGGACGCCATCGTGCCCCAGTCCTTCCTGAAGGACGACTCCATCGACAACAAGGTGCTGACCCGGTCCGAC | |
| | AAGAACCGGGGCAAGTCCGACAACGTGCCCTCCGAGGAGGTGGTGAAGAAGATGAAGAACTACTGGCGGCAGCTGCTGAACGCCAA | |
| | GCTGATCACCCAGCGGAAGTTCGACAACCTGACCAAGGCCGAGCGGGGCGGCCTGTCCGAGCTGGACAAGGCCGGCTTCATCAAGC | |
| | GGCAGCTGGTGGAGACCCGGCAGATCACCAAGCACGTGGCCCAGATCCTGGACTCCCGGATGAACACCAAGTACGACGAGAACGAC | |
| | AAGCTGATCCGGGAGGTGAAGGTGATCACCCTGAAGTCCAAGCTGGTGTCCGACTTCCGGAAGGACTTCCAGTTCTACAAGGTGCG | |
| | GGAGATCAACAACTACCACCACGCCCACGACGCCTACCTGAACGCCGTGGTGGGCACCGCCCTGATCAAGAAGTACCCCAAGCTGG | |
| | AGTCCGAGTTCGTGTACGGCGACTACAAGGTGTACGACGTGCGGAAGATGATCGCCAAGTCCGAGCAGGAGATCGGCAAGGCCACC | |
| | GCCAAGTACTTCTTCTACTCCAACATCATGAACTTCTTCAAGACCGAGATCACCCTGGCCAACGGCGAGATCCGGAAGCGGCCCCT | |
| | GATCGAGACCAACGGCGAGACCGGCGAGATCGTGTGGGACAAGGGCCGGGACTTCGCCACCGTGCGGAAGGTGCTGTCCATGCCCC | |
| | AGGTGAACATCGTGAAGAAGACCGAGGTGCAGACCGGCGGCTTCTCCAAGGAGTCCATCCTGCCCAAGCGGAACTCCGACAAGCTG | |
| | ATCGCCCGGAAGAAGGACTGGGACCCCAAGAAGTACGGCGGCTTCGACTCCCCCACCGTGGCCTACTCCGTGCTGGTGGTGGCCAA | |
| | GGTGGAGAAGGGCAAGTCCAAGAAGCTGAAGTCCGTGAAGGAGCTGCTGGGCATCACCATCATGGAGCGGTCCTCCTTCGAGAAGA | |
| | ACCCCATCGACTTCCTGGAGGCCAAGGGCTACAAGGAGGTGAAGAAGGACCTGATCATCAAGCTGCCCAAGTACTCCCTGTTCGAG | |
| | CTGGAGAACGGCCGGAAGCGGATGCTGGCCTCCGCCGGCGAGCTGCAGAAGGGCAACGAGCTGGCCCTGCCCTCCAAGTACGTGAA | |
| | CTTCCTGTACCTGGCCTCCCACTACGAGAAGCTGAAGGGCTCCCCCGAGGACAACGAGCAGAAGCAGCTGTTCGTGGAGCAGCACA | |
| | AGCACTACCTGGACGAGATCATCGAGCAGATCTCCGAGTTCTCCAAGCGGGTGATCCTGGCCGACGCCAACCTGGACAAGGTGCTG | |
| | TCCGCCTACAACAAGCACCGGGACAAGCCCATCCGGGAGCAGGCCGAGAACATCATCCACCTGTTCACCCTGACCAACCTGGGCGC | |
| | CCCCGCCGCCTTCAAGTACTTCGACACCACCATCGACCGGAAGCGGTACACCTCCACCAAGGAGGTGCTGGACGCCACCCTGATCC | |
| | ACCAGTCCATCACCGGCCTGTACGAGACCCGGATCGACCTGTCCCAGCTGGGCGGCGAC | |
| dCas9 ORF | GACAAGAAGTACTCCATCGGCCTGGCCATCGGCACCAACTCCGTGGGCTGGGCCGTGATCACCGACGAGTACAAGGTGCCCTCCAA | 354 |
| using low A | GAAGTTCAAGGTGCTGGGCAACACCGACCGGCACTCCATCAAGAAGAACCTGATCGGCGCCCTGCTGTTCGACTCCGGCGAGACCG | |
| codons of | CCGAGGCCACCCGGCTGAAGCGGACCGCCCGGCGGCGGTACACCCGGCGGAAGAACCGGATCTGCTACCTGCAGGAGATCTTCTCC | |
| Table 4, | AACGAGATGGCCAAGGTGGACGACTCCTTCTTCCACCGGCTGGAGGAGTCCTTCCTGGTGGAGGAGGACAAGAAGCACGAGCGGCA | |
| with two C- | CCCCATCTTCGGCAACATCGTGGACGAGGTGGCCTACCACGAGAAGTACCCCACCATCTACCACCTGCGGAAGAAGCTGGTGGACT | |
| terminal NLS | CCACCGACAAGGCCGACCTGCGGCTGATCTACCTGGCCCTGGCCCACATGATCAAGTTCCGGGGCCACTTCCTGATCGAGGGCGAC | |
| sequences | CTGAACCCCGACAACTCCGACGTGGACAAGCTGTTCATCCAGCTGGTGCAGACCTACAACCAGCTGTTCGAGGAGAACCCCATCAA | |
| (no start or | CGCCTCCGGCGTGGACGCCAAGGCCATCCTGTCCGCCCGGCTGTCCAAGTCCCGGCGGCTGGAGAACCTGATCGCCCAGCTGCCCG | |
| stop codons; | GCGAGAAGAAGAACGGCCTGTTCGGCAACCTGATCGCCCTGTCCCTGGGCCTGACCCCCAACTTCAAGTCCAACTTCGACCTGGCC | |
| suitable for | GAGGACGCCAAGCTGCAGCTGTCCAAGGACACCTACGACGACGACCTGGACAACCTGCTGGCCCAGATCGGCGACCAGTACGCCGA | |
| inclusion in | CCTGTTCCTGGCCGCCAAGAACCTGTCCGACGCCATCCTGCTGTCCGACATCCTGCGGGTGAACACCGAGATCACCAAGGCCCCCC | |
| fusion | TGTCCGCCTCCATGATCAAGCGGTACGACGAGCACCACCAGGACCTGACCCTGCTGAAGGCCCTGGTGCGGCAGCAGCTGCCCGAG | |
| protein | AAGTACAAGGAGATCTTCTTCGACCAGTCCAAGAACGGCTACGCCGGCTACATCGACGGCGGCGCCTCCCAGGAGGAGTTCTACAA | |
| coding | GTTCATCAAGCCCATCCTGGAGAAGATGGACGGCACCGAGGAGCTGCTGGTGAAGCTGAACCGGGAGGACCTGCTGCGGAAGCAGC | |
| sequence) | GGACCTTCGACAACGGCTCCATCCCCCACCAGATCCACCTGGGCGAGCTGCACGCCATCCTGCGGCGGCAGGAGGACTTCTACCCC | |
| | TTCCTGAAGGACAACCGGGAGAAGATCGAGAAGATCCTGACCTTCCGGATCCCCTACTACGTGGGCCCCCTGGCCCGGGGCAACTC | |
| | CCGGTTCGCCTGGATGACCCGGAAGTCCGAGGAGACCATCACCCCCTGGAACTTCGAGGAGGTGGTGGACAAGGGCGCCTCCGCCC | |
| | AGTCCTTCATCGAGCGGATGACCAACTTCGACAAGAACCTGCCCAACGAGAAGGTGCTGCCCAAGCACTCCCTGCTGTACGAGTAC | |
| | TTCACCGTGTACAACGAGCTGACCAAGGTGAAGTACGTGACCGAGGGCATGCGGAAGCCCGCCTTCCTGTCCGGCGAGCAGAAGAA | |
| | GGCCATCGTGGACCTGCTGTTCAAGACCAACCGGAAGGTGACCGTGAAGCAGCTGAAGGAGGACTACTTCAAGAAGATCGAGTGCT | |
| | TCGACTCCGTGGAGATCTCCGGCGTGGAGGACCGGTTCAACGCCTCCCTGGGCACCTACCACGACCTGCTGAAGATCATCAAGGAC | |
| | AAGGACTTCCTGGACAACGAGGAGAACGAGGACATCCTGGAGGACATCGTGCTGACCCTGACCCTGTTCGAGGACCGGGAGATGAT | |
| | CGAGGAGCGGCTGAAGACCTACGCCCACCTGTTCGACGACAAGGTGATGAAGCAGCTGAAGCGGCGGCGGTACACCGGCTGGGGCC | |
| | GGCTGTCCCGGAAGCTGATCAACGGCATCCGGGACAAGCAGTCCGGCAAGACCATCCTGGACTTCCTGAAGTCCGACGGCTTCGCC | |
| | AACCGGAACTTCATGCAGCTGATCCACGACGACTCCCTGACCTTCAAGGAGGACATCCAGAAGGCCCAGGTGTCCGGCCAGGGCGA | |
| | CTCCCTGCACGAGCACATCGCCAACCTGGCCGGCTCCCCCGCCATCAAGAAGGGCATCCTGCAGACCGTGAAGGTGGTGGACGAGC | |
| | TGGTGAAGGTGATGGGCCGGCACAAGCCCGAGAACATCGTGATCGAGATGGCCCGGGAGAACCAGACCACCCAGAAGGGCCAGAAG | |
| | AACTCCCGGGAGCGGATGAAGCGGATCGAGGAGGGCATCAAGGAGCTGGGCTCCCAGATCCTGAAGGAGCACCCCGTGGAGAACAC | |
| | CCAGCTGCAGAACGAGAAGCTGTACCTGTACTACCTGCAGAACGGCCGGGACATGTACGTGGACCAGGAGCTGGACATCAACCGGC | |
| | TGTCCGACTACGACGTGGACGCCATCGTGCCCCAGTCCTTCCTGAAGGACGACTCCATCGACAACAAGGTGCTGACCCGGTCCGAC | |
| | AAGAACCGGGGCAAGTCCGACAACGTGCCCTCCGAGGAGGTGGTGAAGAAGATGAAGAACTACTGGCGGCAGCTGCTGAACGCCAA | |
| | GCTGATCACCCAGCGGAAGTTCGACAACCTGACCAAGGCCGAGCGGGGCGGCCTGTCCGAGCTGGACAAGGCCGGCTTCATCAAGC | |
| | GGCAGCTGGTGGAGACCCGGCAGATCACCAAGCACGTGGCCCAGATCCTGGACTCCCGGATGAACACCAAGTACGACGAGAACGAC | |
| | AAGCTGATCCGGGAGGTGAAGGTGATCACCCTGAAGTCCAAGCTGGTGTCCGACTTCCGGAAGGACTTCCAGTTCTACAAGGTGCG | |
| | GGAGATCAACAACTACCACCACGCCCACGACGCCTACCTGAACGCCGTGGTGGGCACCGCCCTGATCAAGAAGTACCCCAAGCTGG | |
| | AGTCCGAGTTCGTGTACGGCGACTACAAGGTGTACGACGTGCGGAAGATGATCGCCAAGTCCGAGCAGGAGATCGGCAAGGCCACC | |
| | GCCAAGTACTTCTTCTACTCCAACATCATGAACTTCTTCAAGACCGAGATCACCCTGGCCAACGGCGAGATCCGGAAGCGGCCCCT | |
| | GATCGAGACCAACGGCGAGACCGGCGAGATCGTGTGGGACAAGGGCCGGGACTTCGCCACCGTGCGGAAGGTGCTGTCCATGCCCC | |
| | AGGTGAACATCGTGAAGAAGACCGAGGTGCAGACCGGCGGCTTCTCCAAGGAGTCCATCCTGCCCAAGCGGAACTCCGACAAGCTG | |
| | ATCGCCCGGAAGAAGGACTGGGACCCCAAGAAGTACGGCGGCTTCGACTCCCCCACCGTGGCCTACTCCGTGCTGGTGGTGGCCAA | |
| | GGTGGAGAAGGGCAAGTCCAAGAAGCTGAAGTCCGTGAAGGAGCTGCTGGGCATCACCATCATGGAGCGGTCCTCCTTCGAGAAGA | |
| | ACCCCATCGACTTCCTGGAGGCCAAGGGCTACAAGGAGGTGAAGAAGGACCTGATCATCAAGCTGCCCAAGTACTCCCTGTTCGAG | |
| | CTGGAGAACGGCCGGAAGCGGATGCTGGCCTCCGCCGGCGAGCTGCAGAAGGGCAACGAGCTGGCCCTGCCCTCCAAGTACGTGAA | |
| | CTTCCTGTACCTGGCCTCCCACTACGAGAAGCTGAAGGGCTCCCCCGAGGACAACGAGCAGAAGCAGCTGTTCGTGGAGCAGCACA | |
| | AGCACTACCTGGACGAGATCATCGAGCAGATCTCCGAGTTCTCCAAGCGGGTGATCCTGGCCGACGCCAACCTGGACAAGGTGCTG | |
| | TCCGCCTACAACAAGCACCGGGACAAGCCCATCCGGGAGCAGGCCGAGAACATCATCCACCTGTTCACCCTGACCAACCTGGGCGC | |
| | CCCCGCCGCCTTCAAGTACTTCGACACCACCATCGACCGGAAGCGGTACACCTCCACCAAGGAGGTGCTGGACGCCACCCTGATCC | |
| | ACCAGTCCATCACCGGCCTGTACGAGACCCGGATCGACCTGTCCCAGCTGGGCGGCGACGGCTCCGGCTCCCCCAAGAAGAAGCGG | |
| | AAGGTGGACGGCTCCCCCAAGAAGAAGCGGAAGGTGGACTCCGGC | |
| Cas9 ORF | GACAAGAAGTACAGCATCGGCCTGGACATCGGCACCAACAGCGTGGGCTGGGCCGTGATCACCGACGAGTACAAGGTGCCCAGCAA | 355 |
| using low | GAAGTTCAAGGTGCTGGGCAACACCGACCGGCACAGCATCAAGAAGAACCTGATCGGCGCCCTGCTGTTCGACAGCGGCGAGACCG | |
| A/U codons | CCGAGGCCACCCGGCTGAAGCGGACCGCCCGGCGGCGGTACACCCGGCGGAAGAACCGGATCTGCTACCTGCAGGAGATCTTCAGC | |
| of Table 4, | AACGAGATGGCCAAGGTGGACGACAGCTTCTTCCACCGGCTGGAGGAGAGCTTCCTGGTGGAGGAGGACAAGAAGCACGAGCGGCA | |
| with two C- | CCCCATCTTCGGCAACATCGTGGACGAGGTGGCCTACCACGAGAAGTACCCCACCATCTACCACCTGCGGAAGAAGCTGGTGGACA | |
| terminal NLS | GCACCGACAAGGCCGACCTGCGGCTGATCTACCTGGCCCTGGCCCACATGATCAAGTTCCGGGGCCACTTCCTGATCGAGGGCGAC | |
| sequences | CTGAACCCCGACAACAGCGACGTGGACAAGCTGTTCATCCAGCTGGTGCAGACCTACAACCAGCTGTTCGAGGAGAACCCCATCAA | |
| (no start or | CGCCAGCGGCGTGGACGCCAAGGCCATCCTGAGCGCCCGGCTGAGCAAGAGCCGGCGGCTGGAGAACCTGATCGCCCAGCTGCCCG | |
| stop codons; | GCGAGAAGAAGAACGGCCTGTTCGGCAACCTGATCGCCCTGAGCCTGGGCCTGACCCCCAACTTCAAGAGCAACTTCGACCTGGCC | |
| suitable for | GAGGACGCCAAGCTGCAGCTGAGCAAGGACACCTACGACGACGACCTGGACAACCTGCTGGCCCAGATCGGCGACCAGTACGCCGA | |
| inclusion in | CCTGTTCCTGGCCGCCAAGAACCTGAGCGACGCCATCCTGCTGAGCGACATCCTGCGGGTGAACACCGAGATCACCAAGGCCCCCC | |
| fusion | TGAGCGCCAGCATGATCAAGCGGTACGACGAGCACCACCAGGACCTGACCCTGCTGAAGGCCCTGGTGCGGCAGCAGCTGCCCGAG | |
| protein | AAGTACAAGGAGATCTTCTTCGACCAGAGCAAGAACGGCTACGCCGGCTACATCGACGGCGGCGCCAGCCAGGAGGAGTTCTACAA | |
| coding | GTTCATCAAGCCCATCCTGGAGAAGATGGACGGCACCGAGGAGCTGCTGGTGAAGCTGAACCGGGAGGACCTGCTGCGGAAGCAGC | |
| sequence) | GGACCTTCGACAACGGCAGCATCCCCCACCAGATCCACCTGGGCGAGCTGCACGCCATCCTGCGGCGGCAGGAGGACTTCTACCCC | |
| | TTCCTGAAGGACAACCGGGAGAAGATCGAGAAGATCCTGACCTTCCGGATCCCCTACTACGTGGGCCCCCTGGCCCGGGGCAACAG | |
| | CCGGTTCGCCTGGATGACCCGGAAGAGCGAGGAGACCATCACCCCCTGGAACTTCGAGGAGGTGGTGGACAAGGGCGCCAGCGCCC | |
| | AGAGCTTCATCGAGCGGATGACCAACTTCGACAAGAACCTGCCCAACGAGAAGGTGCTGCCCAAGCACAGCCTGCTGTACGAGTAC | |
| | TTCACCGTGTACAACGAGCTGACCAAGGTGAAGTACGTGACCGAGGGCATGCGGAAGCCCGCCTTCCTGAGCGGCGAGCAGAAGAA | |
| | GGCCATCGTGGACCTGCTGTTCAAGACCAACCGGAAGGTGACCGTGAAGCAGCTGAAGGAGGACTACTTCAAGAAGATCGAGTGCT | |
| | TCGACAGCGTGGAGATCAGCGGCGTGGAGGACCGGTTCAACGCCAGCCTGGGCACCTACCACGACCTGCTGAAGATCATCAAGGAC | |
| | AAGGACTTCCTGGACAACGAGGAGAACGAGGACATCCTGGAGGACATCGTGCTGACCCTGACCCTGTTCGAGGACCGGGAGATGAT | |
| | CGAGGAGCGGCTGAAGACCTACGCCCACCTGTTCGACGACAAGGTGATGAAGCAGCTGAAGCGGCGGCGGTACACCGGCTGGGGCC | |
| | GGCTGAGCCGGAAGCTGATCAACGGCATCCGGGACAAGCAGAGCGGCAAGACCATCCTGGACTTCCTGAAGAGCGACGGCTTCGCC | |
| | AACCGGAACTTCATGCAGCTGATCCACGACGACAGCCTGACCTTCAAGGAGGACATCCAGAAGGCCCAGGTGAGCGGCCAGGGCGA | |
| | CAGCCTGCACGAGCACATCGCCAACCTGGCCGGCAGCCCCGCCATCAAGAAGGGCATCCTGCAGACCGTGAAGGTGGTGGACGAGC | |
| | TGGTGAAGGTGATGGGCCGGCACAAGCCCGAGAACATCGTGATCGAGATGGCCCGGGAGAACCAGACCACCCAGAAGGGCCAGAAG | |
| | AACAGCCGGGAGCGGATGAAGCGGATCGAGGAGGGCATCAAGGAGCTGGGCAGCCAGATCCTGAAGGAGCACCCCGTGGAGAACAC | |
| | CCAGCTGCAGAACGAGAAGCTGTACCTGTACTACCTGCAGAACGGCCGGGACATGTACGTGGACCAGGAGCTGGACATCAACCGGC | |
| | TGAGCGACTACGACGTGGACCACATCGTGCCCCAGAGCTTCCTGAAGGACGACAGCATCGACAACAAGGTGCTGACCCGGAGCGAC | |
| | AAGAACCGGGGCAAGAGCGACAACGTGCCCAGCGAGGAGGTGGTGAAGAAGATGAAGAACTACTGGCGGCAGCTGCTGAACGCCAA | |
| | GCTGATCACCCAGCGGAAGTTCGACAACCTGACCAAGGCCGAGCGGGGCGGCCTGAGCGAGCTGGACAAGGCCGGCTTCATCAAGC | |
| | GGCAGCTGGTGGAGACCCGGCAGATCACCAAGCACGTGGCCCAGATCCTGGACAGCCGGATGAACACCAAGTACGACGAGAACGAC | |
| | AAGCTGATCCGGGAGGTGAAGGTGATCACCCTGAAGAGCAAGCTGGTGAGCGACTTCCGGAAGGACTTCCAGTTCTACAAGGTGCG | |
| | GGAGATCAACAACTACCACCACGCCCACGACGCCTACCTGAACGCCGTGGTGGGCACCGCCCTGATCAAGAAGTACCCCAAGCTGG | |
| | AGAGCGAGTTCGTGTACGGCGACTACAAGGTGTACGACGTGCGGAAGATGATCGCCAAGAGCGAGCAGGAGATCGGCAAGGCCACC | |
| | GCCAAGTACTTCTTCTACAGCAACATCATGAACTTCTTCAAGACCGAGATCACCCTGGCCAACGGCGAGATCCGGAAGCGGCCCCT | |
| | GATCGAGACCAACGGCGAGACCGGCGAGATCGTGTGGGACAAGGGCCGGGACTTCGCCACCGTGCGGAAGGTGCTGAGCATGCCCC | |
| | AGGTGAACATCGTGAAGAAGACCGAGGTGCAGACCGGCGGCTTCAGCAAGGAGAGCATCCTGCCCAAGCGGAACAGCGACAAGCTG | |
| | ATCGCCCGGAAGAAGGACTGGGACCCCAAGAAGTACGGCGGCTTCGACAGCCCCACCGTGGCCTACAGCGTGCTGGTGGTGGCCAA | |
| | GGTGGAGAAGGGCAAGAGCAAGAAGCTGAAGAGCGTGAAGGAGCTGCTGGGCATCACCATCATGGAGCGGAGCAGCTTCGAGAAGA | |
| | ACCCCATCGACTTCCTGGAGGCCAAGGGCTACAAGGAGGTGAAGAAGGACCTGATCATCAAGCTGCCCAAGTACAGCCTGTTCGAG | |
| | CTGGAGAACGGCCGGAAGCGGATGCTGGCCAGCGCCGGCGAGCTGCAGAAGGGCAACGAGCTGGCCCTGCCCAGCAAGTACGTGAA | |
| | CTTCCTGTACCTGGCCAGCCACTACGAGAAGCTGAAGGGCAGCCCCGAGGACAACGAGCAGAAGCAGCTGTTCGTGGAGCAGCACA | |
| | AGCACTACCTGGACGAGATCATCGAGCAGATCAGCGAGTTCAGCAAGCGGGTGATCCTGGCCGACGCCAACCTGGACAAGGTGCTG | |
| | AGCGCCTACAACAAGCACCGGGACAAGCCCATCCGGGAGCAGGCCGAGAACATCATCCACCTGTTCACCCTGACCAACCTGGGCGC | |
| | CCCCGCCGCCTTCAAGTACTTCGACACCACCATCGACCGGAAGCGGTACACCAGCACCAAGGAGGTGCTGGACGCCACCCTGATCC | |
| | ACCAGAGCATCACCGGCCTGTACGAGACCCGGATCGACCTGAGCCAGCTGGGCGGCGACGGCAGCGGCAGCCCCAAGAAGAAGCGG | |
| | AAGGTGGACGGCAGCCCCAAGAAGAAGCGGAAGGTGGACAGCGGC | |
| Cas9 ORF | GACAAGAAGTACAGCATCGGCCTGGACATCGGCACCAACAGCGTGGGCTGGGCCGTGATCACCGACGAGTACAAGGTGCCCAGCAA | 356 |
| using low | GAAGTTCAAGGTGCTGGGCAACACCGACCGGCACAGCATCAAGAAGAACCTGATCGGCGCCCTGCTGTTCGACAGCGGCGAGACCG | |
| A/U codons | CCGAGGCCACCCGGCTGAAGCGGACCGCCCGGCGGCGGTACACCCGGCGGAAGAACCGGATCTGCTACCTGCAGGAGATCTTCAGC | |
| of Table 4 | AACGAGATGGCCAAGGTGGACGACAGCTTCTTCCACCGGCTGGAGGAGAGCTTCCTGGTGGAGGAGGACAAGAAGCACGAGCGGCA | |
| (no NLS and | CCCCATCTTCGGCAACATCGTGGACGAGGTGGCCTACCACGAGAAGTACCCCACCATCTACCACCTGCGGAAGAAGCTGGTGGACA | |
| no start or | GCACCGACAAGGCCGACCTGCGGCTGATCTACCTGGCCCTGGCCCACATGATCAAGTTCCGGGGCCACTTCCTGATCGAGGGCGAC | |
| stop codons; | CTGAACCCCGACAACAGCGACGTGGACAAGCTGTTCATCCAGCTGGTGCAGACCTACAACCAGCTGTTCGAGGAGAACCCCATCAA | |
| suitable for | CGCCAGCGGCGTGGACGCCAAGGCCATCCTGAGCGCCCGGCTGAGCAAGAGCCGGCGGCTGGAGAACCTGATCGCCCAGCTGCCCG | |
| inclusion in | GCGAGAAGAAGAACGGCCTGTTCGGCAACCTGATCGCCCTGAGCCTGGGCCTGACCCCCAACTTCAAGAGCAACTTCGACCTGGCC | |
| fusion | GAGGACGCCAAGCTGCAGCTGAGCAAGGACACCTACGACGACGACCTGGACAACCTGCTGGCCCAGATCGGCGACCAGTACGCCGA | |
| protein | CCTGTTCCTGGCCGCCAAGAACCTGAGCGACGCCATCCTGCTGAGCGACATCCTGCGGGTGAACACCGAGATCACCAAGGCCCCCC | |
| coding | TGAGCGCCAGCATGATCAAGCGGTACGACGAGCACCACCAGGACCTGACCCTGCTGAAGGCCCTGGTGCGGCAGCAGCTGCCCGAG | |
| sequence) | AAGTACAAGGAGATCTTCTTCGACCAGAGCAAGAACGGCTACGCCGGCTACATCGACGGCGGCGCCAGCCAGGAGGAGTTCTACAA | |
| | GTTCATCAAGCCCATCCTGGAGAAGATGGACGGCACCGAGGAGCTGCTGGTGAAGCTGAACCGGGAGGACCTGCTGCGGAAGCAGC | |
| | GGACCTTCGACAACGGCAGCATCCCCCACCAGATCCACCTGGGCGAGCTGCACGCCATCCTGCGGCGGCAGGAGGACTTCTACCCC | |
| | TTCCTGAAGGACAACCGGGAGAAGATCGAGAAGATCCTGACCTTCCGGATCCCCTACTACGTGGGCCCCCTGGCCCGGGGCAACAG | |
| | CCGGTTCGCCTGGATGACCCGGAAGAGCGAGGAGACCATCACCCCCTGGAACTTCGAGGAGGTGGTGGACAAGGGCGCCAGCGCCC | |
| | AGAGCTTCATCGAGCGGATGACCAACTTCGACAAGAACCTGCCCAACGAGAAGGTGCTGCCCAAGCACAGCCTGCTGTACGAGTAC | |
| | TTCACCGTGTACAACGAGCTGACCAAGGTGAAGTACGTGACCGAGGGCATGCGGAAGCCCGCCTTCCTGAGCGGCGAGCAGAAGAA | |
| | GGCCATCGTGGACCTGCTGTTCAAGACCAACCGGAAGGTGACCGTGAAGCAGCTGAAGGAGGACTACTTCAAGAAGATCGAGTGCT | |
| | TCGACAGCGTGGAGATCAGCGGCGTGGAGGACCGGTTCAACGCCAGCCTGGGCACCTACCACGACCTGCTGAAGATCATCAAGGAC | |
| | AAGGACTTCCTGGACAACGAGGAGAACGAGGACATCCTGGAGGACATCGTGCTGACCCTGACCCTGTTCGAGGACCGGGAGATGAT | |
| | CGAGGAGCGGCTGAAGACCTACGCCCACCTGTTCGACGACAAGGTGATGAAGCAGCTGAAGCGGCGGCGGTACACCGGCTGGGGCC | |
| | GGCTGAGCCGGAAGCTGATCAACGGCATCCGGGACAAGCAGAGCGGCAAGACCATCCTGGACTTCCTGAAGAGCGACGGCTTCGCC | |
| | AACCGGAACTTCATGCAGCTGATCCACGACGACAGCCTGACCTTCAAGGAGGACATCCAGAAGGCCCAGGTGAGCGGCCAGGGCGA | |
| | CAGCCTGCACGAGCACATCGCCAACCTGGCCGGCAGCCCCGCCATCAAGAAGGGCATCCTGCAGACCGTGAAGGTGGTGGACGAGC | |
| | TGGTGAAGGTGATGGGCCGGCACAAGCCCGAGAACATCGTGATCGAGATGGCCCGGGAGAACCAGACCACCCAGAAGGGCCAGAAG | |
| | AACAGCCGGGAGCGGATGAAGCGGATCGAGGAGGGCATCAAGGAGCTGGGCAGCCAGATCCTGAAGGAGCACCCCGTGGAGAACAC | |
| | CCAGCTGCAGAACGAGAAGCTGTACCTGTACTACCTGCAGAACGGCCGGGACATGTACGTGGACCAGGAGCTGGACATCAACCGGC | |
| | TGAGCGACTACGACGTGGACCACATCGTGCCCCAGAGCTTCCTGAAGGACGACAGCATCGACAACAAGGTGCTGACCCGGAGCGAC | |
| | AAGAACCGGGGCAAGAGCGACAACGTGCCCAGCGAGGAGGTGGTGAAGAAGATGAAGAACTACTGGCGGCAGCTGCTGAACGCCAA | |
| | GCTGATCACCCAGCGGAAGTTCGACAACCTGACCAAGGCCGAGCGGGGCGGCCTGAGCGAGCTGGACAAGGCCGGCTTCATCAAGC | |
| | GGCAGCTGGTGGAGACCCGGCAGATCACCAAGCACGTGGCCCAGATCCTGGACAGCCGGATGAACACCAAGTACGACGAGAACGAC | |
| | AAGCTGATCCGGGAGGTGAAGGTGATCACCCTGAAGAGCAAGCTGGTGAGCGACTTCCGGAAGGACTTCCAGTTCTACAAGGTGCG | |
| | GGAGATCAACAACTACCACCACGCCCACGACGCCTACCTGAACGCCGTGGTGGGCACCGCCCTGATCAAGAAGTACCCCAAGCTGG | |
| | AGAGCGAGTTCGTGTACGGCGACTACAAGGTGTACGACGTGCGGAAGATGATCGCCAAGAGCGAGCAGGAGATCGGCAAGGCCACC | |
| | GCCAAGTACTTCTTCTACAGCAACATCATGAACTTCTTCAAGACCGAGATCACCCTGGCCAACGGCGAGATCCGGAAGCGGCCCCT | |
| | GATCGAGACCAACGGCGAGACCGGCGAGATCGTGTGGGACAAGGGCCGGGACTTCGCCACCGTGCGGAAGGTGCTGAGCATGCCCC | |
| | AGGTGAACATCGTGAAGAAGACCGAGGTGCAGACCGGCGGCTTCAGCAAGGAGAGCATCCTGCCCAAGCGGAACAGCGACAAGCTG | |
| | ATCGCCCGGAAGAAGGACTGGGACCCCAAGAAGTACGGCGGCTTCGACAGCCCCACCGTGGCCTACAGCGTGCTGGTGGTGGCCAA | |
| | GGTGGAGAAGGGCAAGAGCAAGAAGCTGAAGAGCGTGAAGGAGCTGCTGGGCATCACCATCATGGAGCGGAGCAGCTTCGAGAAGA | |
| | ACCCCATCGACTTCCTGGAGGCCAAGGGCTACAAGGAGGTGAAGAAGGACCTGATCATCAAGCTGCCCAAGTACAGCCTGTTCGAG | |
| | CTGGAGAACGGCCGGAAGCGGATGCTGGCCAGCGCCGGCGAGCTGCAGAAGGGCAACGAGCTGGCCCTGCCCAGCAAGTACGTGAA | |
| | CTTCCTGTACCTGGCCAGCCACTACGAGAAGCTGAAGGGCAGCCCCGAGGACAACGAGCAGAAGCAGCTGTTCGTGGAGCAGCACA | |
| | AGCACTACCTGGACGAGATCATCGAGCAGATCAGCGAGTTCAGCAAGCGGGTGATCCTGGCCGACGCCAACCTGGACAAGGTGCTG | |
| | AGCGCCTACAACAAGCACCGGGACAAGCCCATCCGGGAGCAGGCCGAGAACATCATCCACCTGTTCACCCTGACCAACCTGGGCGC | |
| | CCCCGCCGCCTTCAAGTACTTCGACACCACCATCGACCGGAAGCGGTACACCAGCACCAAGGAGGTGCTGGACGCCACCCTGATCC | |
| | ACCAGAGCATCACCGGCCTGTACGAGACCCGGATCGACCTGAGCCAGCTGGGCGGCGAC | |
| Cas9 nickase | GACAAGAAGTACAGCATCGGCCTGGCCATCGGCACCAACAGCGTGGGCTGGGCCGTGATCACCGACGAGTACAAGGTGCCCAGCAA | 357 |
| ORF using | GAAGTTCAAGGTGCTGGGCAACACCGACCGGCACAGCATCAAGAAGAACCTGATCGGCGCCCTGCTGTTCGACAGCGGCGAGACCG | |
| low A/U | CCGAGGCCACCCGGCTGAAGCGGACCGCCCGGCGGCGGTACACCCGGCGGAAGAACCGGATCTGCTACCTGCAGGAGATCTTCAGC | |
| codons of | AACGAGATGGCCAAGGTGGACGACAGCTTCTTCCACCGGCTGGAGGAGAGCTTCCTGGTGGAGGAGGACAAGAAGCACGAGCGGCA | |
| Table 4 (no | CCCCATCTTCGGCAACATCGTGGACGAGGTGGCCTACCACGAGAAGTACCCCACCATCTACCACCTGCGGAAGAAGCTGGTGGACA | |
| start or | GCACCGACAAGGCCGACCTGCGGCTGATCTACCTGGCCCTGGCCCACATGATCAAGTTCCGGGGCCACTTCCTGATCGAGGGCGAC | |
| stop codons; | CTGAACCCCGACAACAGCGACGTGGACAAGCTGTTCATCCAGCTGGTGCAGACCTACAACCAGCTGTTCGAGGAGAACCCCATCAA | |
| suitable for | CGCCAGCGGCGTGGACGCCAAGGCCATCCTGAGCGCCCGGCTGAGCAAGAGCCGGCGGCTGGAGAACCTGATCGCCCAGCTGCCCG | |
| inclusion in | GCGAGAAGAAGAACGGCCTGTTCGGCAACCTGATCGCCCTGAGCCTGGGCCTGACCCCCAACTTCAAGAGCAACTTCGACCTGGCC | |
| fusion | GAGGACGCCAAGCTGCAGCTGAGCAAGGACACCTACGACGACGACCTGGACAACCTGCTGGCCCAGATCGGCGACCAGTACGCCGA | |
| protein | CCTGTTCCTGGCCGCCAAGAACCTGAGCGACGCCATCCTGCTGAGCGACATCCTGCGGGTGAACACCGAGATCACCAAGGCCCCCC | |
| coding | TGAGCGCCAGCATGATCAAGCGGTACGACGAGCACCACCAGGACCTGACCCTGCTGAAGGCCCTGGTGCGGCAGCAGCTGCCCGAG | |
| sequence) | AAGTACAAGGAGATCTTCTTCGACCAGAGCAAGAACGGCTACGCCGGCTACATCGACGGCGGCGCCAGCCAGGAGGAGTTCTACAA | |
| | GTTCATCAAGCCCATCCTGGAGAAGATGGACGGCACCGAGGAGCTGCTGGTGAAGCTGAACCGGGAGGACCTGCTGCGGAAGCAGC | |
| | GGACCTTCGACAACGGCAGCATCCCCCACCAGATCCACCTGGGCGAGCTGCACGCCATCCTGCGGCGGCAGGAGGACTTCTACCCC | |
| | TTCCTGAAGGACAACCGGGAGAAGATCGAGAAGATCCTGACCTTCCGGATCCCCTACTACGTGGGCCCCCTGGCCCGGGGCAACAG | |
| | CCGGTTCGCCTGGATGACCCGGAAGAGCGAGGAGACCATCACCCCCTGGAACTTCGAGGAGGTGGTGGACAAGGGCGCCAGCGCCC | |
| | AGAGCTTCATCGAGCGGATGACCAACTTCGACAAGAACCTGCCCAACGAGAAGGTGCTGCCCAAGCACAGCCTGCTGTACGAGTAC | |
| | TTCACCGTGTACAACGAGCTGACCAAGGTGAAGTACGTGACCGAGGGCATGCGGAAGCCCGCCTTCCTGAGCGGCGAGCAGAAGAA | |
| | GGCCATCGTGGACCTGCTGTTCAAGACCAACCGGAAGGTGACCGTGAAGCAGCTGAAGGAGGACTACTTCAAGAAGATCGAGTGCT | |
| | TCGACAGCGTGGAGATCAGCGGCGTGGAGGACCGGTTCAACGCCAGCCTGGGCACCTACCACGACCTGCTGAAGATCATCAAGGAC | |
| | AAGGACTTCCTGGACAACGAGGAGAACGAGGACATCCTGGAGGACATCGTGCTGACCCTGACCCTGTTCGAGGACCGGGAGATGAT | |
| | CGAGGAGCGGCTGAAGACCTACGCCCACCTGTTCGACGACAAGGTGATGAAGCAGCTGAAGCGGCGGCGGTACACCGGCTGGGGCC | |
| | GGCTGAGCCGGAAGCTGATCAACGGCATCCGGGACAAGCAGAGCGGCAAGACCATCCTGGACTTCCTGAAGAGCGACGGCTTCGCC | |
| | AACCGGAACTTCATGCAGCTGATCCACGACGACAGCCTGACCTTCAAGGAGGACATCCAGAAGGCCCAGGTGAGCGGCCAGGGCGA | |
| | CAGCCTGCACGAGCACATCGCCAACCTGGCCGGCAGCCCCGCCATCAAGAAGGGCATCCTGCAGACCGTGAAGGTGGTGGACGAGC | |
| | TGGTGAAGGTGATGGGCCGGCACAAGCCCGAGAACATCGTGATCGAGATGGCCCGGGAGAACCAGACCACCCAGAAGGGCCAGAAG | |
| | AACAGCCGGGAGCGGATGAAGCGGATCGAGGAGGGCATCAAGGAGCTGGGCAGCCAGATCCTGAAGGAGCACCCCGTGGAGAACAC | |
| | CCAGCTGCAGAACGAGAAGCTGTACCTGTACTACCTGCAGAACGGCCGGGACATGTACGTGGACCAGGAGCTGGACATCAACCGGC | |
| | TGAGCGACTACGACGTGGACCACATCGTGCCCCAGAGCTTCCTGAAGGACGACAGCATCGACAACAAGGTGCTGACCCGGAGCGAC | |
| | AAGAACCGGGGCAAGAGCGACAACGTGCCCAGCGAGGAGGTGGTGAAGAAGATGAAGAACTACTGGCGGCAGCTGCTGAACGCCAA | |
| | GCTGATCACCCAGCGGAAGTTCGACAACCTGACCAAGGCCGAGCGGGGCGGCCTGAGCGAGCTGGACAAGGCCGGCTTCATCAAGC | |
| | GGCAGCTGGTGGAGACCCGGCAGATCACCAAGCACGTGGCCCAGATCCTGGACAGCCGGATGAACACCAAGTACGACGAGAACGAC | |
| | AAGCTGATCCGGGAGGTGAAGGTGATCACCCTGAAGAGCAAGCTGGTGAGCGACTTCCGGAAGGACTTCCAGTTCTACAAGGTGCG | |
| | GGAGATCAACAACTACCACCACGCCCACGACGCCTACCTGAACGCCGTGGTGGGCACCGCCCTGATCAAGAAGTACCCCAAGCTGG | |
| | AGAGCGAGTTCGTGTACGGCGACTACAAGGTGTACGACGTGCGGAAGATGATCGCCAAGAGCGAGCAGGAGATCGGCAAGGCCACC | |
| | GCCAAGTACTTCTTCTACAGCAACATCATGAACTTCTTCAAGACCGAGATCACCCTGGCCAACGGCGAGATCCGGAAGCGGCCCCT | |
| | GATCGAGACCAACGGCGAGACCGGCGAGATCGTGTGGGACAAGGGCCGGGACTTCGCCACCGTGCGGAAGGTGCTGAGCATGCCCC | |
| | AGGTGAACATCGTGAAGAAGACCGAGGTGCAGACCGGCGGCTTCAGCAAGGAGAGCATCCTGCCCAAGCGGAACAGCGACAAGCTG | |
| | ATCGCCCGGAAGAAGGACTGGGACCCCAAGAAGTACGGCGGCTTCGACAGCCCCACCGTGGCCTACAGCGTGCTGGTGGTGGCCAA | |
| | GGTGGAGAAGGGCAAGAGCAAGAAGCTGAAGAGCGTGAAGGAGCTGCTGGGCATCACCATCATGGAGCGGAGCAGCTTCGAGAAGA | |
| | ACCCCATCGACTTCCTGGAGGCCAAGGGCTACAAGGAGGTGAAGAAGGACCTGATCATCAAGCTGCCCAAGTACAGCCTGTTCGAG | |
| | CTGGAGAACGGCCGGAAGCGGATGCTGGCCAGCGCCGGCGAGCTGCAGAAGGGCAACGAGCTGGCCCTGCCCAGCAAGTACGTGAA | |
| | CTTCCTGTACCTGGCCAGCCACTACGAGAAGCTGAAGGGCAGCCCCGAGGACAACGAGCAGAAGCAGCTGTTCGTGGAGCAGCACA | |
| | AGCACTACCTGGACGAGATCATCGAGCAGATCAGCGAGTTCAGCAAGCGGGTGATCCTGGCCGACGCCAACCTGGACAAGGTGCTG | |
| | AGCGCCTACAACAAGCACCGGGACAAGCCCATCCGGGAGCAGGCCGAGAACATCATCCACCTGTTCACCCTGACCAACCTGGGCGC | |
| | CCCCGCCGCCTTCAAGTACTTCGACACCACCATCGACCGGAAGCGGTACACCAGCACCAAGGAGGTGCTGGACGCCACCCTGATCC | |
| | ACCAGAGCATCACCGGCCTGTACGAGACCCGGATCGACCTGAGCCAGCTGGGCGGCGACGGCGGCGGCAGCCCCAAGAAGAAGCGG | |
| | AAGGTG | |
| Cas9 nickase | GACAAGAAGTACAGCATCGGCCTGGCCATCGGCACCAACAGCGTGGGCTGGGCCGTGATCACCGACGAGTACAAGGTGCCCAGCAA | 358 |
| ORF using | GAAGTTCAAGGTGCTGGGCAACACCGACCGGCACAGCATCAAGAAGAACCTGATCGGCGCCCTGCTGTTCGACAGCGGCGAGACCG | |
| low A/U | CCGAGGCCACCCGGCTGAAGCGGACCGCCCGGCGGCGGTACACCCGGCGGAAGAACCGGATCTGCTACCTGCAGGAGATCTTCAGC | |
| codons of | AACGAGATGGCCAAGGTGGACGACAGCTTCTTCCACCGGCTGGAGGAGAGCTTCCTGGTGGAGGAGGACAAGAAGCACGAGCGGCA | |
| Table 4, | CCCCATCTTCGGCAACATCGTGGACGAGGTGGCCTACCACGAGAAGTACCCCACCATCTACCACCTGCGGAAGAAGCTGGTGGACA | |
| with two C- | GCACCGACAAGGCCGACCTGCGGCTGATCTACCTGGCCCTGGCCCACATGATCAAGTTCCGGGGCCACTTCCTGATCGAGGGCGAC | |
| terminal NLS | CTGAACCCCGACAACAGCGACGTGGACAAGCTGTTCATCCAGCTGGTGCAGACCTACAACCAGCTGTTCGAGGAGAACCCCATCAA | |
| sequences | CGCCAGCGGCGTGGACGCCAAGGCCATCCTGAGCGCCCGGCTGAGCAAGAGCCGGCGGCTGGAGAACCTGATCGCCCAGCTGCCCG | |
| (no start or | GCGAGAAGAAGAACGGCCTGTTCGGCAACCTGATCGCCCTGAGCCTGGGCCTGACCCCCAACTTCAAGAGCAACTTCGACCTGGCC | |
| stop codons; | GAGGACGCCAAGCTGCAGCTGAGCAAGGACACCTACGACGACGACCTGGACAACCTGCTGGCCCAGATCGGCGACCAGTACGCCGA | |
| suitable for | CCTGTTCCTGGCCGCCAAGAACCTGAGCGACGCCATCCTGCTGAGCGACATCCTGCGGGTGAACACCGAGATCACCAAGGCCCCCC | |
| inclusion in | TGAGCGCCAGCATGATCAAGCGGTACGACGAGCACCACCAGGACCTGACCCTGCTGAAGGCCCTGGTGCGGCAGCAGCTGCCCGAG | |
| fusion | AAGTACAAGGAGATCTTCTTCGACCAGAGCAAGAACGGCTACGCCGGCTACATCGACGGCGGCGCCAGCCAGGAGGAGTTCTACAA | |
| protein | GTTCATCAAGCCCATCCTGGAGAAGATGGACGGCACCGAGGAGCTGCTGGTGAAGCTGAACCGGGAGGACCTGCTGCGGAAGCAGC | |
| coding | GGACCTTCGACAACGGCAGCATCCCCCACCAGATCCACCTGGGCGAGCTGCACGCCATCCTGCGGCGGCAGGAGGACTTCTACCCC | |
| sequence) | TTCCTGAAGGACAACCGGGAGAAGATCGAGAAGATCCTGACCTTCCGGATCCCCTACTACGTGGGCCCCCTGGCCCGGGGCAACAG | |
| | CCGGTTCGCCTGGATGACCCGGAAGAGCGAGGAGACCATCACCCCCTGGAACTTCGAGGAGGTGGTGGACAAGGGCGCCAGCGCCC | |
| | AGAGCTTCATCGAGCGGATGACCAACTTCGACAAGAACCTGCCCAACGAGAAGGTGCTGCCCAAGCACAGCCTGCTGTACGAGTAC | |
| | TTCACCGTGTACAACGAGCTGACCAAGGTGAAGTACGTGACCGAGGGCATGCGGAAGCCCGCCTTCCTGAGCGGCGAGCAGAAGAA | |
| | GGCCATCGTGGACCTGCTGTTCAAGACCAACCGGAAGGTGACCGTGAAGCAGCTGAAGGAGGACTACTTCAAGAAGATCGAGTGCT | |
| | TCGACAGCGTGGAGATCAGCGGCGTGGAGGACCGGTTCAACGCCAGCCTGGGCACCTACCACGACCTGCTGAAGATCATCAAGGAC | |
| | AAGGACTTCCTGGACAACGAGGAGAACGAGGACATCCTGGAGGACATCGTGCTGACCCTGACCCTGTTCGAGGACCGGGAGATGAT | |
| | CGAGGAGCGGCTGAAGACCTACGCCCACCTGTTCGACGACAAGGTGATGAAGCAGCTGAAGCGGCGGCGGTACACCGGCTGGGGCC | |
| | GGCTGAGCCGGAAGCTGATCAACGGCATCCGGGACAAGCAGAGCGGCAAGACCATCCTGGACTTCCTGAAGAGCGACGGCTTCGCC | |
| | AACCGGAACTTCATGCAGCTGATCCACGACGACAGCCTGACCTTCAAGGAGGACATCCAGAAGGCCCAGGTGAGCGGCCAGGGCGA | |
| | CAGCCTGCACGAGCACATCGCCAACCTGGCCGGCAGCCCCGCCATCAAGAAGGGCATCCTGCAGACCGTGAAGGTGGTGGACGAGC | |
| | TGGTGAAGGTGATGGGCCGGCACAAGCCCGAGAACATCGTGATCGAGATGGCCCGGGAGAACCAGACCACCCAGAAGGGCCAGAAG | |
| | AACAGCCGGGAGCGGATGAAGCGGATCGAGGAGGGCATCAAGGAGCTGGGCAGCCAGATCCTGAAGGAGCACCCCGTGGAGAACAC | |
| | CCAGCTGCAGAACGAGAAGCTGTACCTGTACTACCTGCAGAACGGCCGGGACATGTACGTGGACCAGGAGCTGGACATCAACCGGC | |
| | TGAGCGACTACGACGTGGACCACATCGTGCCCCAGAGCTTCCTGAAGGACGACAGCATCGACAACAAGGTGCTGACCCGGAGCGAC | |
| | AAGAACCGGGGCAAGAGCGACAACGTGCCCAGCGAGGAGGTGGTGAAGAAGATGAAGAACTACTGGCGGCAGCTGCTGAACGCCAA | |
| | GCTGATCACCCAGCGGAAGTTCGACAACCTGACCAAGGCCGAGCGGGGCGGCCTGAGCGAGCTGGACAAGGCCGGCTTCATCAAGC | |
| | GGCAGCTGGTGGAGACCCGGCAGATCACCAAGCACGTGGCCCAGATCCTGGACAGCCGGATGAACACCAAGTACGACGAGAACGAC | |
| | AAGCTGATCCGGGAGGTGAAGGTGATCACCCTGAAGAGCAAGCTGGTGAGCGACTTCCGGAAGGACTTCCAGTTCTACAAGGTGCG | |
| | GGAGATCAACAACTACCACCACGCCCACGACGCCTACCTGAACGCCGTGGTGGGCACCGCCCTGATCAAGAAGTACCCCAAGCTGG | |
| | AGAGCGAGTTCGTGTACGGCGACTACAAGGTGTACGACGTGCGGAAGATGATCGCCAAGAGCGAGCAGGAGATCGGCAAGGCCACC | |
| | GCCAAGTACTTCTTCTACAGCAACATCATGAACTTCTTCAAGACCGAGATCACCCTGGCCAACGGCGAGATCCGGAAGCGGCCCCT | |
| | GATCGAGACCAACGGCGAGACCGGCGAGATCGTGTGGGACAAGGGCCGGGACTTCGCCACCGTGCGGAAGGTGCTGAGCATGCCCC | |
| | AGGTGAACATCGTGAAGAAGACCGAGGTGCAGACCGGCGGCTTCAGCAAGGAGAGCATCCTGCCCAAGCGGAACAGCGACAAGCTG | |
| | ATCGCCCGGAAGAAGGACTGGGACCCCAAGAAGTACGGCGGCTTCGACAGCCCCACCGTGGCCTACAGCGTGCTGGTGGTGGCCAA | |
| | GGTGGAGAAGGGCAAGAGCAAGAAGCTGAAGAGCGTGAAGGAGCTGCTGGGCATCACCATCATGGAGCGGAGCAGCTTCGAGAAGA | |
| | ACCCCATCGACTTCCTGGAGGCCAAGGGCTACAAGGAGGTGAAGAAGGACCTGATCATCAAGCTGCCCAAGTACAGCCTGTTCGAG | |
| | CTGGAGAACGGCCGGAAGCGGATGCTGGCCAGCGCCGGCGAGCTGCAGAAGGGCAACGAGCTGGCCCTGCCCAGCAAGTACGTGAA | |
| | CTTCCTGTACCTGGCCAGCCACTACGAGAAGCTGAAGGGCAGCCCCGAGGACAACGAGCAGAAGCAGCTGTTCGTGGAGCAGCACA | |
| | AGCACTACCTGGACGAGATCATCGAGCAGATCAGCGAGTTCAGCAAGCGGGTGATCCTGGCCGACGCCAACCTGGACAAGGTGCTG | |
| | AGCGCCTACAACAAGCACCGGGACAAGCCCATCCGGGAGCAGGCCGAGAACATCATCCACCTGTTCACCCTGACCAACCTGGGCGC | |
| | CCCCGCCGCCTTCAAGTACTTCGACACCACCATCGACCGGAAGCGGTACACCAGCACCAAGGAGGTGCTGGACGCCACCCTGATCC | |
| | ACCAGAGCATCACCGGCCTGTACGAGACCCGGATCGACCTGAGCCAGCTGGGCGGCGACGGCAGCGGCAGCCCCAAGAAGAAGCGG | |
| | AAGGTGGACGGCAGCCCCAAGAAGAAGCGGAAGGTGGACAGCGGC | |
| Cas9 nickase | GACAAGAAGTACAGCATCGGCCTGGcCATCGGCACCAACAGCGTGGGCTGGGCCGTGATCACCGACGAGTACAAGGTGCCCAGCAA | 359 |
| ORF using | GAAGTTCAAGGTGCTGGGCAACACCGACCGGCACAGCATCAAGAAGAACCTGATCGGCGCCCTGCTGTTCGACAGCGGCGAGACCG | |
| low A/U | CCGAGGCCACCCGGCTGAAGCGGACCGCCCGGCGGCGGTACACCCGGCGGAAGAACCGGATCTGCTACCTGCAGGAGATCTTCAGC | |
| codons of | AACGAGATGGCCAAGGTGGACGACAGCTTCTTCCACCGGCTGGAGGAGAGCTTCCTGGTGGAGGAGGACAAGAAGCACGAGCGGCA | |
| Table 4 (no | CCCCATCTTCGGCAACATCGTGGACGAGGTGGCCTACCACGAGAAGTACCCCACCATCTACCACCTGCGGAAGAAGCTGGTGGACA | |
| NLS and no | GCACCGACAAGGCCGACCTGCGGCTGATCTACCTGGCCCTGGCCCACATGATCAAGTTCCGGGGCCACTTCCTGATCGAGGGCGAC | |
| start or | CTGAACCCCGACAACAGCGACGTGGACAAGCTGTTCATCCAGCTGGTGCAGACCTACAACCAGCTGTTCGAGGAGAACCCCATCAA | |
| stop codons; | CGCCAGCGGCGTGGACGCCAAGGCCATCCTGAGCGCCCGGCTGAGCAAGAGCCGGCGGCTGGAGAACCTGATCGCCCAGCTGCCCG | |
| suitable for | GCGAGAAGAAGAACGGCCTGTTCGGCAACCTGATCGCCCTGAGCCTGGGCCTGACCCCCAACTTCAAGAGCAACTTCGACCTGGCC | |
| inclusion in | GAGGACGCCAAGCTGCAGCTGAGCAAGGACACCTACGACGACGACCTGGACAACCTGCTGGCCCAGATCGGCGACCAGTACGCCGA | |
| fusion | CCTGTTCCTGGCCGCCAAGAACCTGAGCGACGCCATCCTGCTGAGCGACATCCTGCGGGTGAACACCGAGATCACCAAGGCCCCCC | |
| protein | TGAGCGCCAGCATGATCAAGCGGTACGACGAGCACCACCAGGACCTGACCCTGCTGAAGGCCCTGGTGCGGCAGCAGCTGCCCGAG | |
| coding | AAGTACAAGGAGATCTTCTTCGACCAGAGCAAGAACGGCTACGCCGGCTACATCGACGGCGGCGCCAGCCAGGAGGAGTTCTACAA | |
| sequence) | GTTCATCAAGCCCATCCTGGAGAAGATGGACGGCACCGAGGAGCTGCTGGTGAAGCTGAACCGGGAGGACCTGCTGCGGAAGCAGC | |
| | GGACCTTCGACAACGGCAGCATCCCCCACCAGATCCACCTGGGCGAGCTGCACGCCATCCTGCGGCGGCAGGAGGACTTCTACCCC | |
| | TTCCTGAAGGACAACCGGGAGAAGATCGAGAAGATCCTGACCTTCCGGATCCCCTACTACGTGGGCCCCCTGGCCCGGGGCAACAG | |
| | CCGGTTCGCCTGGATGACCCGGAAGAGCGAGGAGACCATCACCCCCTGGAACTTCGAGGAGGTGGTGGACAAGGGCGCCAGCGCCC | |
| | AGAGCTTCATCGAGCGGATGACCAACTTCGACAAGAACCTGCCCAACGAGAAGGTGCTGCCCAAGCACAGCCTGCTGTACGAGTAC | |
| | TTCACCGTGTACAACGAGCTGACCAAGGTGAAGTACGTGACCGAGGGCATGCGGAAGCCCGCCTTCCTGAGCGGCGAGCAGAAGAA | |
| | GGCCATCGTGGACCTGCTGTTCAAGACCAACCGGAAGGTGACCGTGAAGCAGCTGAAGGAGGACTACTTCAAGAAGATCGAGTGCT | |
| | TCGACAGCGTGGAGATCAGCGGCGTGGAGGACCGGTTCAACGCCAGCCTGGGCACCTACCACGACCTGCTGAAGATCATCAAGGAC | |
| | AAGGACTTCCTGGACAACGAGGAGAACGAGGACATCCTGGAGGACATCGTGCTGACCCTGACCCTGTTCGAGGACCGGGAGATGAT | |
| | CGAGGAGCGGCTGAAGACCTACGCCCACCTGTTCGACGACAAGGTGATGAAGCAGCTGAAGCGGCGGCGGTACACCGGCTGGGGCC | |
| | GGCTGAGCCGGAAGCTGATCAACGGCATCCGGGACAAGCAGAGCGGCAAGACCATCCTGGACTTCCTGAAGAGCGACGGCTTCGCC | |
| | AACCGGAACTTCATGCAGCTGATCCACGACGACAGCCTGACCTTCAAGGAGGACATCCAGAAGGCCCAGGTGAGCGGCCAGGGCGA | |
| | CAGCCTGCACGAGCACATCGCCAACCTGGCCGGCAGCCCCGCCATCAAGAAGGGCATCCTGCAGACCGTGAAGGTGGTGGACGAGC | |
| | TGGTGAAGGTGATGGGCCGGCACAAGCCCGAGAACATCGTGATCGAGATGGCCCGGGAGAACCAGACCACCCAGAAGGGCCAGAAG | |
| | AACAGCCGGGAGCGGATGAAGCGGATCGAGGAGGGCATCAAGGAGCTGGGCAGCCAGATCCTGAAGGAGCACCCCGTGGAGAACAC | |
| | CCAGCTGCAGAACGAGAAGCTGTACCTGTACTACCTGCAGAACGGCCGGGACATGTACGTGGACCAGGAGCTGGACATCAACCGGC | |
| | TGAGCGACTACGACGTGGACCACATCGTGCCCCAGAGCTTCCTGAAGGACGACAGCATCGACAACAAGGTGCTGACCCGGAGCGAC | |
| | AAGAACCGGGGCAAGAGCGACAACGTGCCCAGCGAGGAGGTGGTGAAGAAGATGAAGAACTACTGGCGGCAGCTGCTGAACGCCAA | |
| | GCTGATCACCCAGCGGAAGTTCGACAACCTGACCAAGGCCGAGCGGGGCGGCCTGAGCGAGCTGGACAAGGCCGGCTTCATCAAGC | |
| | GGCAGCTGGTGGAGACCCGGCAGATCACCAAGCACGTGGCCCAGATCCTGGACAGCCGGATGAACACCAAGTACGACGAGAACGAC | |
| | AAGCTGATCCGGGAGGTGAAGGTGATCACCCTGAAGAGCAAGCTGGTGAGCGACTTCCGGAAGGACTTCCAGTTCTACAAGGTGCG | |
| | GGAGATCAACAACTACCACCACGCCCACGACGCCTACCTGAACGCCGTGGTGGGCACCGCCCTGATCAAGAAGTACCCCAAGCTGG | |
| | AGAGCGAGTTCGTGTACGGCGACTACAAGGTGTACGACGTGCGGAAGATGATCGCCAAGAGCGAGCAGGAGATCGGCAAGGCCACC | |
| | GCCAAGTACTTCTTCTACAGCAACATCATGAACTTCTTCAAGACCGAGATCACCCTGGCCAACGGCGAGATCCGGAAGCGGCCCCT | |
| | GATCGAGACCAACGGCGAGACCGGCGAGATCGTGTGGGACAAGGGCCGGGACTTCGCCACCGTGCGGAAGGTGCTGAGCATGCCCC | |
| | AGGTGAACATCGTGAAGAAGACCGAGGTGCAGACCGGCGGCTTCAGCAAGGAGAGCATCCTGCCCAAGCGGAACAGCGACAAGCTG | |
| | ATCGCCCGGAAGAAGGACTGGGACCCCAAGAAGTACGGCGGCTTCGACAGCCCCACCGTGGCCTACAGCGTGCTGGTGGTGGCCAA | |
| | GGTGGAGAAGGGCAAGAGCAAGAAGCTGAAGAGCGTGAAGGAGCTGCTGGGCATCACCATCATGGAGCGGAGCAGCTTCGAGAAGA | |
| | ACCCCATCGACTTCCTGGAGGCCAAGGGCTACAAGGAGGTGAAGAAGGACCTGATCATCAAGCTGCCCAAGTACAGCCTGTTCGAG | |
| | CTGGAGAACGGCCGGAAGCGGATGCTGGCCAGCGCCGGCGAGCTGCAGAAGGGCAACGAGCTGGCCCTGCCCAGCAAGTACGTGAA | |
| | CTTCCTGTACCTGGCCAGCCACTACGAGAAGCTGAAGGGCAGCCCCGAGGACAACGAGCAGAAGCAGCTGTTCGTGGAGCAGCACA | |
| | AGCACTACCTGGACGAGATCATCGAGCAGATCAGCGAGTTCAGCAAGCGGGTGATCCTGGCCGACGCCAACCTGGACAAGGTGCTG | |
| | AGCGCCTACAACAAGCACCGGGACAAGCCCATCCGGGAGCAGGCCGAGAACATCATCCACCTGTTCACCCTGACCAACCTGGGCGC | |
| | CCCCGCCGCCTTCAAGTACTTCGACACCACCATCGACCGGAAGCGGTACACCAGCACCAAGGAGGTGCTGGACGCCACCCTGATCC | |
| | ACCAGAGCATCACCGGCCTGTACGAGACCCGGATCGACCTGAGCCAGCTGGGCGGCGAC | |
| dCas9 ORF | GACAAGAAGTACAGCATCGGCCTGGcCATCGGCACCAACAGCGTGGGCTGGGCCGTGATCACCGACGAGTACAAGGTGCCCAGCAA | 360 |
| using low | GAAGTTCAAGGTGCTGGGCAACACCGACCGGCACAGCATCAAGAAGAACCTGATCGGCGCCCTGCTGTTCGACAGCGGCGAGACCG | |
| A/U codons | CCGAGGCCACCCGGCTGAAGCGGACCGCCCGGCGGCGGTACACCCGGCGGAAGAACCGGATCTGCTACCTGCAGGAGATCTTCAGC | |
| of Table 4 | AACGAGATGGCCAAGGTGGACGACAGCTTCTTCCACCGGCTGGAGGAGAGCTTCCTGGTGGAGGAGGACAAGAAGCACGAGCGGCA | |
| (no start or | CCCCATCTTCGGCAACATCGTGGACGAGGTGGCCTACCACGAGAAGTACCCCACCATCTACCACCTGCGGAAGAAGCTGGTGGACA | |
| stop codons; | GCACCGACAAGGCCGACCTGCGGCTGATCTACCTGGCCCTGGCCCACATGATCAAGTTCCGGGGCCACTTCCTGATCGAGGGCGAC | |
| suitable for | CTGAACCCCGACAACAGCGACGTGGACAAGCTGTTCATCCAGCTGGTGCAGACCTACAACCAGCTGTTCGAGGAGAACCCCATCAA | |
| inclusion in | CGCCAGCGGCGTGGACGCCAAGGCCATCCTGAGCGCCCGGCTGAGCAAGAGCCGGCGGCTGGAGAACCTGATCGCCCAGCTGCCCG | |
| fusion | GCGAGAAGAAGAACGGCCTGTTCGGCAACCTGATCGCCCTGAGCCTGGGCCTGACCCCCAACTTCAAGAGCAACTTCGACCTGGCC | |
| protein | GAGGACGCCAAGCTGCAGCTGAGCAAGGACACCTACGACGACGACCTGGACAACCTGCTGGCCCAGATCGGCGACCAGTACGCCGA | |
| coding | CCTGTTCCTGGCCGCCAAGAACCTGAGCGACGCCATCCTGCTGAGCGACATCCTGCGGGTGAACACCGAGATCACCAAGGCCCCCC | |
| sequence) | TGAGCGCCAGCATGATCAAGCGGTACGACGAGCACCACCAGGACCTGACCCTGCTGAAGGCCCTGGTGCGGCAGCAGCTGCCCGAG | |
| | AAGTACAAGGAGATCTTCTTCGACCAGAGCAAGAACGGCTACGCCGGCTACATCGACGGCGGCGCCAGCCAGGAGGAGTTCTACAA | |
| | GTTCATCAAGCCCATCCTGGAGAAGATGGACGGCACCGAGGAGCTGCTGGTGAAGCTGAACCGGGAGGACCTGCTGCGGAAGCAGC | |
| | GGACCTTCGACAACGGCAGCATCCCCCACCAGATCCACCTGGGCGAGCTGCACGCCATCCTGCGGCGGCAGGAGGACTTCTACCCC | |
| | TTCCTGAAGGACAACCGGGAGAAGATCGAGAAGATCCTGACCTTCCGGATCCCCTACTACGTGGGCCCCCTGGCCCGGGGCAACAG | |
| | CCGGTTCGCCTGGATGACCCGGAAGAGCGAGGAGACCATCACCCCCTGGAACTTCGAGGAGGTGGTGGACAAGGGCGCCAGCGCCC | |
| | AGAGCTTCATCGAGCGGATGACCAACTTCGACAAGAACCTGCCCAACGAGAAGGTGCTGCCCAAGCACAGCCTGCTGTACGAGTAC | |
| | TTCACCGTGTACAACGAGCTGACCAAGGTGAAGTACGTGACCGAGGGCATGCGGAAGCCCGCCTTCCTGAGCGGCGAGCAGAAGAA | |
| | GGCCATCGTGGACCTGCTGTTCAAGACCAACCGGAAGGTGACCGTGAAGCAGCTGAAGGAGGACTACTTCAAGAAGATCGAGTGCT | |
| | TCGACAGCGTGGAGATCAGCGGCGTGGAGGACCGGTTCAACGCCAGCCTGGGCACCTACCACGACCTGCTGAAGATCATCAAGGAC | |
| | AAGGACTTCCTGGACAACGAGGAGAACGAGGACATCCTGGAGGACATCGTGCTGACCCTGACCCTGTTCGAGGACCGGGAGATGAT | |
| | CGAGGAGCGGCTGAAGACCTACGCCCACCTGTTCGACGACAAGGTGATGAAGCAGCTGAAGCGGCGGCGGTACACCGGCTGGGGCC | |
| | GGCTGAGCCGGAAGCTGATCAACGGCATCCGGGACAAGCAGAGCGGCAAGACCATCCTGGACTTCCTGAAGAGCGACGGCTTCGCC | |
| | AACCGGAACTTCATGCAGCTGATCCACGACGACAGCCTGACCTTCAAGGAGGACATCCAGAAGGCCCAGGTGAGCGGCCAGGGCGA | |
| | CAGCCTGCACGAGCACATCGCCAACCTGGCCGGCAGCCCCGCCATCAAGAAGGGCATCCTGCAGACCGTGAAGGTGGTGGACGAGC | |
| | TGGTGAAGGTGATGGGCCGGCACAAGCCCGAGAACATCGTGATCGAGATGGCCCGGGAGAACCAGACCACCCAGAAGGGCCAGAAG | |
| | AACAGCCGGGAGCGGATGAAGCGGATCGAGGAGGGCATCAAGGAGCTGGGCAGCCAGATCCTGAAGGAGCACCCCGTGGAGAACAC | |
| | CCAGCTGCAGAACGAGAAGCTGTACCTGTACTACCTGCAGAACGGCCGGGACATGTACGTGGACCAGGAGCTGGACATCAACCGGC | |
| | TGAGCGACTACGACGTGGACgcCATCGTGCCCCAGAGCTTCCTGAAGGACGACAGCATCGACAACAAGGTGCTGACCCGGAGCGAC | |
| | AAGAACCGGGGCAAGAGCGACAACGTGCCCAGCGAGGAGGTGGTGAAGAAGATGAAGAACTACTGGCGGCAGCTGCTGAACGCCAA | |
| | GCTGATCACCCAGCGGAAGTTCGACAACCTGACCAAGGCCGAGCGGGGCGGCCTGAGCGAGCTGGACAAGGCCGGCTTCATCAAGC | |
| | GGCAGCTGGTGGAGACCCGGCAGATCACCAAGCACGTGGCCCAGATCCTGGACAGCCGGATGAACACCAAGTACGACGAGAACGAC | |
| | AAGCTGATCCGGGAGGTGAAGGTGATCACCCTGAAGAGCAAGCTGGTGAGCGACTTCCGGAAGGACTTCCAGTTCTACAAGGTGCG | |
| | GGAGATCAACAACTACCACCACGCCCACGACGCCTACCTGAACGCCGTGGTGGGCACCGCCCTGATCAAGAAGTACCCCAAGCTGG | |
| | AGAGCGAGTTCGTGTACGGCGACTACAAGGTGTACGACGTGCGGAAGATGATCGCCAAGAGCGAGCAGGAGATCGGCAAGGCCACC | |
| | GCCAAGTACTTCTTCTACAGCAACATCATGAACTTCTTCAAGACCGAGATCACCCTGGCCAACGGCGAGATCCGGAAGCGGCCCCT | |
| | GATCGAGACCAACGGCGAGACCGGCGAGATCGTGTGGGACAAGGGCCGGGACTTCGCCACCGTGCGGAAGGTGCTGAGCATGCCCC | |
| | AGGTGAACATCGTGAAGAAGACCGAGGTGCAGACCGGCGGCTTCAGCAAGGAGAGCATCCTGCCCAAGCGGAACAGCGACAAGCTG | |
| | ATCGCCCGGAAGAAGGACTGGGACCCCAAGAAGTACGGCGGCTTCGACAGCCCCACCGTGGCCTACAGCGTGCTGGTGGTGGCCAA | |
| | GGTGGAGAAGGGCAAGAGCAAGAAGCTGAAGAGCGTGAAGGAGCTGCTGGGCATCACCATCATGGAGCGGAGCAGCTTCGAGAAGA | |
| | ACCCCATCGACTTCCTGGAGGCCAAGGGCTACAAGGAGGTGAAGAAGGACCTGATCATCAAGCTGCCCAAGTACAGCCTGTTCGAG | |
| | CTGGAGAACGGCCGGAAGCGGATGCTGGCCAGCGCCGGCGAGCTGCAGAAGGGCAACGAGCTGGCCCTGCCCAGCAAGTACGTGAA | |
| | CTTCCTGTACCTGGCCAGCCACTACGAGAAGCTGAAGGGCAGCCCCGAGGACAACGAGCAGAAGCAGCTGTTCGTGGAGCAGCACA | |
| | AGCACTACCTGGACGAGATCATCGAGCAGATCAGCGAGTTCAGCAAGCGGGTGATCCTGGCCGACGCCAACCTGGACAAGGTGCTG | |
| | AGCGCCTACAACAAGCACCGGGACAAGCCCATCCGGGAGCAGGCCGAGAACATCATCCACCTGTTCACCCTGACCAACCTGGGCGC | |
| | CCCCGCCGCCTTCAAGTACTTCGACACCACCATCGACCGGAAGCGGTACACCAGCACCAAGGAGGTGCTGGACGCCACCCTGATCC | |
| | ACCAGAGCATCACCGGCCTGTACGAGACCCGGATCGACCTGAGCCAGCTGGGCGGCGACGGCGGCGGCAGCCCCAAGAAGAAGCGG | |
| | AAGGTG | |
| dCas9 ORF | GACAAGAAGTACAGCATCGGCCTGGCCATCGGCACCAACAGCGTGGGCTGGGCCGTGATCACCGACGAGTACAAGGTGCCCAGCAA | 361 |
| using low | GAAGTTCAAGGTGCTGGGCAACACCGACCGGCACAGCATCAAGAAGAACCTGATCGGCGCCCTGCTGTTCGACAGCGGCGAGACCG | |
| A/U codons | CCGAGGCCACCCGGCTGAAGCGGACCGCCCGGCGGCGGTACACCCGGCGGAAGAACCGGATCTGCTACCTGCAGGAGATCTTCAGC | |
| of Table 4, | AACGAGATGGCCAAGGTGGACGACAGCTTCTTCCACCGGCTGGAGGAGAGCTTCCTGGTGGAGGAGGACAAGAAGCACGAGCGGCA | |
| with two C- | CCCCATCTTCGGCAACATCGTGGACGAGGTGGCCTACCACGAGAAGTACCCCACCATCTACCACCTGCGGAAGAAGCTGGTGGACA | |
| terminal NLS | GCACCGACAAGGCCGACCTGCGGCTGATCTACCTGGCCCTGGCCCACATGATCAAGTTCCGGGGCCACTTCCTGATCGAGGGCGAC | |
| sequences | CTGAACCCCGACAACAGCGACGTGGACAAGCTGTTCATCCAGCTGGTGCAGACCTACAACCAGCTGTTCGAGGAGAACCCCATCAA | |
| (no start or | CGCCAGCGGCGTGGACGCCAAGGCCATCCTGAGCGCCCGGCTGAGCAAGAGCCGGCGGCTGGAGAACCTGATCGCCCAGCTGCCCG | |
| stop codons; | GCGAGAAGAAGAACGGCCTGTTCGGCAACCTGATCGCCCTGAGCCTGGGCCTGACCCCCAACTTCAAGAGCAACTTCGACCTGGCC | |
| suitable for | GAGGACGCCAAGCTGCAGCTGAGCAAGGACACCTACGACGACGACCTGGACAACCTGCTGGCCCAGATCGGCGACCAGTACGCCGA | |
| inclusion in | CCTGTTCCTGGCCGCCAAGAACCTGAGCGACGCCATCCTGCTGAGCGACATCCTGCGGGTGAACACCGAGATCACCAAGGCCCCCC | |
| fusion | TGAGCGCCAGCATGATCAAGCGGTACGACGAGCACCACCAGGACCTGACCCTGCTGAAGGCCCTGGTGCGGCAGCAGCTGCCCGAG | |
| protein | AAGTACAAGGAGATCTTCTTCGACCAGAGCAAGAACGGCTACGCCGGCTACATCGACGGCGGCGCCAGCCAGGAGGAGTTCTACAA | |
| coding | GTTCATCAAGCCCATCCTGGAGAAGATGGACGGCACCGAGGAGCTGCTGGTGAAGCTGAACCGGGAGGACCTGCTGCGGAAGCAGC | |
| sequence) | GGACCTTCGACAACGGCAGCATCCCCCACCAGATCCACCTGGGCGAGCTGCACGCCATCCTGCGGCGGCAGGAGGACTTCTACCCC | |
| | TTCCTGAAGGACAACCGGGAGAAGATCGAGAAGATCCTGACCTTCCGGATCCCCTACTACGTGGGCCCCCTGGCCCGGGGCAACAG | |
| | CCGGTTCGCCTGGATGACCCGGAAGAGCGAGGAGACCATCACCCCCTGGAACTTCGAGGAGGTGGTGGACAAGGGCGCCAGCGCCC | |
| | AGAGCTTCATCGAGCGGATGACCAACTTCGACAAGAACCTGCCCAACGAGAAGGTGCTGCCCAAGCACAGCCTGCTGTACGAGTAC | |
| | TTCACCGTGTACAACGAGCTGACCAAGGTGAAGTACGTGACCGAGGGCATGCGGAAGCCCGCCTTCCTGAGCGGCGAGCAGAAGAA | |
| | GGCCATCGTGGACCTGCTGTTCAAGACCAACCGGAAGGTGACCGTGAAGCAGCTGAAGGAGGACTACTTCAAGAAGATCGAGTGCT | |
| | TCGACAGCGTGGAGATCAGCGGCGTGGAGGACCGGTTCAACGCCAGCCTGGGCACCTACCACGACCTGCTGAAGATCATCAAGGAC | |
| | AAGGACTTCCTGGACAACGAGGAGAACGAGGACATCCTGGAGGACATCGTGCTGACCCTGACCCTGTTCGAGGACCGGGAGATGAT | |
| | CGAGGAGCGGCTGAAGACCTACGCCCACCTGTTCGACGACAAGGTGATGAAGCAGCTGAAGCGGCGGCGGTACACCGGCTGGGGCC | |
| | GGCTGAGCCGGAAGCTGATCAACGGCATCCGGGACAAGCAGAGCGGCAAGACCATCCTGGACTTCCTGAAGAGCGACGGCTTCGCC | |
| | AACCGGAACTTCATGCAGCTGATCCACGACGACAGCCTGACCTTCAAGGAGGACATCCAGAAGGCCCAGGTGAGCGGCCAGGGCGA | |
| | CAGCCTGCACGAGCACATCGCCAACCTGGCCGGCAGCCCCGCCATCAAGAAGGGCATCCTGCAGACCGTGAAGGTGGTGGACGAGC | |
| | TGGTGAAGGTGATGGGCCGGCACAAGCCCGAGAACATCGTGATCGAGATGGCCCGGGAGAACCAGACCACCCAGAAGGGCCAGAAG | |
| | AACAGCCGGGAGCGGATGAAGCGGATCGAGGAGGGCATCAAGGAGCTGGGCAGCCAGATCCTGAAGGAGCACCCCGTGGAGAACAC | |
| | CCAGCTGCAGAACGAGAAGCTGTACCTGTACTACCTGCAGAACGGCCGGGACATGTACGTGGACCAGGAGCTGGACATCAACCGGC | |
| | TGAGCGACTACGACGTGGACGCCATCGTGCCCCAGAGCTTCCTGAAGGACGACAGCATCGACAACAAGGTGCTGACCCGGAGCGAC | |
| | AAGAACCGGGGCAAGAGCGACAACGTGCCCAGCGAGGAGGTGGTGAAGAAGATGAAGAACTACTGGCGGCAGCTGCTGAACGCCAA | |
| | GCTGATCACCCAGCGGAAGTTCGACAACCTGACCAAGGCCGAGCGGGGCGGCCTGAGCGAGCTGGACAAGGCCGGCTTCATCAAGC | |
| | GGCAGCTGGTGGAGACCCGGCAGATCACCAAGCACGTGGCCCAGATCCTGGACAGCCGGATGAACACCAAGTACGACGAGAACGAC | |
| | AAGCTGATCCGGGAGGTGAAGGTGATCACCCTGAAGAGCAAGCTGGTGAGCGACTTCCGGAAGGACTTCCAGTTCTACAAGGTGCG | |
| | GGAGATCAACAACTACCACCACGCCCACGACGCCTACCTGAACGCCGTGGTGGGCACCGCCCTGATCAAGAAGTACCCCAAGCTGG | |
| | AGAGCGAGTTCGTGTACGGCGACTACAAGGTGTACGACGTGCGGAAGATGATCGCCAAGAGCGAGCAGGAGATCGGCAAGGCCACC | |
| | GCCAAGTACTTCTTCTACAGCAACATCATGAACTTCTTCAAGACCGAGATCACCCTGGCCAACGGCGAGATCCGGAAGCGGCCCCT | |
| | GATCGAGACCAACGGCGAGACCGGCGAGATCGTGTGGGACAAGGGCCGGGACTTCGCCACCGTGCGGAAGGTGCTGAGCATGCCCC | |
| | AGGTGAACATCGTGAAGAAGACCGAGGTGCAGACCGGCGGCTTCAGCAAGGAGAGCATCCTGCCCAAGCGGAACAGCGACAAGCTG | |
| | ATCGCCCGGAAGAAGGACTGGGACCCCAAGAAGTACGGCGGCTTCGACAGCCCCACCGTGGCCTACAGCGTGCTGGTGGTGGCCAA | |
| | GGTGGAGAAGGGCAAGAGCAAGAAGCTGAAGAGCGTGAAGGAGCTGCTGGGCATCACCATCATGGAGCGGAGCAGCTTCGAGAAGA | |
| | ACCCCATCGACTTCCTGGAGGCCAAGGGCTACAAGGAGGTGAAGAAGGACCTGATCATCAAGCTGCCCAAGTACAGCCTGTTCGAG | |
| | CTGGAGAACGGCCGGAAGCGGATGCTGGCCAGCGCCGGCGAGCTGCAGAAGGGCAACGAGCTGGCCCTGCCCAGCAAGTACGTGAA | |
| | CTTCCTGTACCTGGCCAGCCACTACGAGAAGCTGAAGGGCAGCCCCGAGGACAACGAGCAGAAGCAGCTGTTCGTGGAGCAGCACA | |
| | AGCACTACCTGGACGAGATCATCGAGCAGATCAGCGAGTTCAGCAAGCGGGTGATCCTGGCCGACGCCAACCTGGACAAGGTGCTG | |
| | AGCGCCTACAACAAGCACCGGGACAAGCCCATCCGGGAGCAGGCCGAGAACATCATCCACCTGTTCACCCTGACCAACCTGGGCGC | |
| | CCCCGCCGCCTTCAAGTACTTCGACACCACCATCGACCGGAAGCGGTACACCAGCACCAAGGAGGTGCTGGACGCCACCCTGATCC | |
| | ACCAGAGCATCACCGGCCTGTACGAGACCCGGATCGACCTGAGCCAGCTGGGCGGCGACGGCAGCGGCAGCCCCAAGAAGAAGCGG | |
| | AAGGTGGACGGCAGCCCCAAGAAGAAGCGGAAGGTGGACAGCGGC | |
| dCas9 ORF | GACAAGAAGTACAGCATCGGCCTGGcCATCGGCACCAACAGCGTGGGCTGGGCCGTGATCACCGACGAGTACAAGGTGCCCAGCAA | 362 |
| using low | GAAGTTCAAGGTGCTGGGCAACACCGACCGGCACAGCATCAAGAAGAACCTGATCGGCGCCCTGCTGTTCGACAGCGGCGAGACCG | |
| A/U codons | CCGAGGCCACCCGGCTGAAGCGGACCGCCCGGCGGCGGTACACCCGGCGGAAGAACCGGATCTGCTACCTGCAGGAGATCTTCAGC | |
| of Table 4 | AACGAGATGGCCAAGGTGGACGACAGCTTCTTCCACCGGCTGGAGGAGAGCTTCCTGGTGGAGGAGGACAAGAAGCACGAGCGGCA | |
| (no NLS and | CCCCATCTTCGGCAACATCGTGGACGAGGTGGCCTACCACGAGAAGTACCCCACCATCTACCACCTGCGGAAGAAGCTGGTGGACA | |
| no start or | GCACCGACAAGGCCGACCTGCGGCTGATCTACCTGGCCCTGGCCCACATGATCAAGTTCCGGGGCCACTTCCTGATCGAGGGCGAC | |
| stop codons; | CTGAACCCCGACAACAGCGACGTGGACAAGCTGTTCATCCAGCTGGTGCAGACCTACAACCAGCTGTTCGAGGAGAACCCCATCAA | |
| suitable for | CGCCAGCGGCGTGGACGCCAAGGCCATCCTGAGCGCCCGGCTGAGCAAGAGCCGGCGGCTGGAGAACCTGATCGCCCAGCTGCCCG | |
| inclusion in | GCGAGAAGAAGAACGGCCTGTTCGGCAACCTGATCGCCCTGAGCCTGGGCCTGACCCCCAACTTCAAGAGCAACTTCGACCTGGCC | |
| fusion | GAGGACGCCAAGCTGCAGCTGAGCAAGGACACCTACGACGACGACCTGGACAACCTGCTGGCCCAGATCGGCGACCAGTACGCCGA | |
| protein | CCTGTTCCTGGCCGCCAAGAACCTGAGCGACGCCATCCTGCTGAGCGACATCCTGCGGGTGAACACCGAGATCACCAAGGCCCCCC | |
| coding | TGAGCGCCAGCATGATCAAGCGGTACGACGAGCACCACCAGGACCTGACCCTGCTGAAGGCCCTGGTGCGGCAGCAGCTGCCCGAG | |
| sequence) | AAGTACAAGGAGATCTTCTTCGACCAGAGCAAGAACGGCTACGCCGGCTACATCGACGGCGGCGCCAGCCAGGAGGAGTTCTACAA | |
| | GTTCATCAAGCCCATCCTGGAGAAGATGGACGGCACCGAGGAGCTGCTGGTGAAGCTGAACCGGGAGGACCTGCTGCGGAAGCAGC | |
| | GGACCTTCGACAACGGCAGCATCCCCCACCAGATCCACCTGGGCGAGCTGCACGCCATCCTGCGGCGGCAGGAGGACTTCTACCCC | |
| | TTCCTGAAGGACAACCGGGAGAAGATCGAGAAGATCCTGACCTTCCGGATCCCCTACTACGTGGGCCCCCTGGCCCGGGGCAACAG | |
| | CCGGTTCGCCTGGATGACCCGGAAGAGCGAGGAGACCATCACCCCCTGGAACTTCGAGGAGGTGGTGGACAAGGGCGCCAGCGCCC | |
| | AGAGCTTCATCGAGCGGATGACCAACTTCGACAAGAACCTGCCCAACGAGAAGGTGCTGCCCAAGCACAGCCTGCTGTACGAGTAC | |
| | TTCACCGTGTACAACGAGCTGACCAAGGTGAAGTACGTGACCGAGGGCATGCGGAAGCCCGCCTTCCTGAGCGGCGAGCAGAAGAA | |
| | GGCCATCGTGGACCTGCTGTTCAAGACCAACCGGAAGGTGACCGTGAAGCAGCTGAAGGAGGACTACTTCAAGAAGATCGAGTGCT | |
| | TCGACAGCGTGGAGATCAGCGGCGTGGAGGACCGGTTCAACGCCAGCCTGGGCACCTACCACGACCTGCTGAAGATCATCAAGGAC | |
| | AAGGACTTCCTGGACAACGAGGAGAACGAGGACATCCTGGAGGACATCGTGCTGACCCTGACCCTGTTCGAGGACCGGGAGATGAT | |
| | CGAGGAGCGGCTGAAGACCTACGCCCACCTGTTCGACGACAAGGTGATGAAGCAGCTGAAGCGGCGGCGGTACACCGGCTGGGGCC | |
| | GGCTGAGCCGGAAGCTGATCAACGGCATCCGGGACAAGCAGAGCGGCAAGACCATCCTGGACTTCCTGAAGAGCGACGGCTTCGCC | |
| | AACCGGAACTTCATGCAGCTGATCCACGACGACAGCCTGACCTTCAAGGAGGACATCCAGAAGGCCCAGGTGAGCGGCCAGGGCGA | |
| | CAGCCTGCACGAGCACATCGCCAACCTGGCCGGCAGCCCCGCCATCAAGAAGGGCATCCTGCAGACCGTGAAGGTGGTGGACGAGC | |
| | TGGTGAAGGTGATGGGCCGGCACAAGCCCGAGAACATCGTGATCGAGATGGCCCGGGAGAACCAGACCACCCAGAAGGGCCAGAAG | |
| | AACAGCCGGGAGCGGATGAAGCGGATCGAGGAGGGCATCAAGGAGCTGGGCAGCCAGATCCTGAAGGAGCACCCCGTGGAGAACAC | |
| | CCAGCTGCAGAACGAGAAGCTGTACCTGTACTACCTGCAGAACGGCCGGGACATGTACGTGGACCAGGAGCTGGACATCAACCGGC | |
| | TGAGCGACTACGACGTGGACgcCATCGTGCCCCAGAGCTTCCTGAAGGACGACAGCATCGACAACAAGGTGCTGACCCGGAGCGAC | |
| | AAGAACCGGGGCAAGAGCGACAACGTGCCCAGCGAGGAGGTGGTGAAGAAGATGAAGAACTACTGGCGGCAGCTGCTGAACGCCAA | |
| | GCTGATCACCCAGCGGAAGTTCGACAACCTGACCAAGGCCGAGCGGGGCGGCCTGAGCGAGCTGGACAAGGCCGGCTTCATCAAGC | |
| | GGCAGCTGGTGGAGACCCGGCAGATCACCAAGCACGTGGCCCAGATCCTGGACAGCCGGATGAACACCAAGTACGACGAGAACGAC | |
| | AAGCTGATCCGGGAGGTGAAGGTGATCACCCTGAAGAGCAAGCTGGTGAGCGACTTCCGGAAGGACTTCCAGTTCTACAAGGTGCG | |
| | GGAGATCAACAACTACCACCACGCCCACGACGCCTACCTGAACGCCGTGGTGGGCACCGCCCTGATCAAGAAGTACCCCAAGCTGG | |
| | AGAGCGAGTTCGTGTACGGCGACTACAAGGTGTACGACGTGCGGAAGATGATCGCCAAGAGCGAGCAGGAGATCGGCAAGGCCACC | |
| | GCCAAGTACTTCTTCTACAGCAACATCATGAACTTCTTCAAGACCGAGATCACCCTGGCCAACGGCGAGATCCGGAAGCGGCCCCT | |
| | GATCGAGACCAACGGCGAGACCGGCGAGATCGTGTGGGACAAGGGCCGGGACTTCGCCACCGTGCGGAAGGTGCTGAGCATGCCCC | |
| | AGGTGAACATCGTGAAGAAGACCGAGGTGCAGACCGGCGGCTTCAGCAAGGAGAGCATCCTGCCCAAGCGGAACAGCGACAAGCTG | |
| | ATCGCCCGGAAGAAGGACTGGGACCCCAAGAAGTACGGCGGCTTCGACAGCCCCACCGTGGCCTACAGCGTGCTGGTGGTGGCCAA | |
| | GGTGGAGAAGGGCAAGAGCAAGAAGCTGAAGAGCGTGAAGGAGCTGCTGGGCATCACCATCATGGAGCGGAGCAGCTTCGAGAAGA | |
| | ACCCCATCGACTTCCTGGAGGCCAAGGGCTACAAGGAGGTGAAGAAGGACCTGATCATCAAGCTGCCCAAGTACAGCCTGTTCGAG | |
| | CTGGAGAACGGCCGGAAGCGGATGCTGGCCAGCGCCGGCGAGCTGCAGAAGGGCAACGAGCTGGCCCTGCCCAGCAAGTACGTGAA | |
| | CTTCCTGTACCTGGCCAGCCACTACGAGAAGCTGAAGGGCAGCCCCGAGGACAACGAGCAGAAGCAGCTGTTCGTGGAGCAGCACA | |
| | AGCACTACCTGGACGAGATCATCGAGCAGATCAGCGAGTTCAGCAAGCGGGTGATCCTGGCCGACGCCAACCTGGACAAGGTGCTG | |
| | AGCGCCTACAACAAGCACCGGGACAAGCCCATCCGGGAGCAGGCCGAGAACATCATCCACCTGTTCACCCTGACCAACCTGGGCGC | |
| | CCCCGCCGCCTTCAAGTACTTCGACACCACCATCGACCGGAAGCGGTACACCAGCACCAAGGAGGTGCTGGACGCCACCCTGATCC | |
| | ACCAGAGCATCACCGGCCTGTACGAGACCCGGATCGACCTGAGCCAGCTGGGCGGCGAC | |
| Nme Cas9 ORF | GCCGCCTTCAAGCCCAACTCCATCAACTACATCCTGGGCCTGGACATCGGCATCGCCTCCGTGGGCTGGGCCATGGTGGAGATCGA | 363 |
| using low A | CGAGGAGGAGAACCCCATCCGGCTGATCGACCTGGGCGTGCGGGTGTTCGAGCGGGCCGAGGTGCCCAAGACCGGCGACTCCCTGG | |
| codons of | CCATGGCCCGGCGGCTGGCCCGGTCCGTGCGGCGGCTGACCCGGCGGCGGGCCCACCGGCTGCTGCGGACCCGGCGGCTGCTGAAG | |
| Table 4 (no | CGGGAGGGCGTGCTGCAGGCCGCCAACTTCGACGAGAACGGCCTGATCAAGTCCCTGCCCAACACCCCCTGGCAGCTGCGGGCCGC | |
| start or | CGCCCTGGACCGGAAGCTGACCCCCCTGGAGTGGTCCGCCGTGCTGCTGCACCTGATCAAGCACCGGGGCTACCTGTCCCAGCGGA | |
| stop codons; | AGAACGAGGGCGAGACCGCCGACAAGGAGCTGGGCGCCCTGCTGAAGGGCGTGGCCGGCAACGCCCACGCCCTGCAGACCGGCGAC | |
| suitable for | TTCCGGACCCCCGCCGAGCTGGCCCTGAACAAGTTCGAGAAGGAGTCCGGCCACATCCGGAACCAGCGGTCCGACTACTCCCACAC | |
| inclusion in | CTTCTCCCGGAAGGACCTGCAGGCCGAGCTGATCCTGCTGTTCGAGAAGCAGAAGGAGTTCGGCAACCCCCACGTGTCCGGCGGCC | |
| fusion | TGAAGGAGGGCATCGAGACCCTGCTGATGACCCAGCGGCCCGCCCTGTCCGGCGACGCCGTGCAGAAGATGCTGGGCCACTGCACC | |
| protein | TTCGAGCCCGCCGAGCCCAAGGCCGCCAAGAACACCTACACCGCCGAGCGGTTCATCTGGCTGACCAAGCTGAACAACCTGCGGAT | |
| coding | CCTGGAGCAGGGCTCCGAGCGGCCCCTGACCGACACCGAGCGGGCCACCCTGATGGACGAGCCCTACCGGAAGTCCAAGCTGACCT | |
| sequence) | ACGCCCAGGCCCGGAAGCTGCTGGGCCTGGAGGACACCGCCTTCTTCAAGGGCCTGCGGTACGGCAAGGACAACGCCGAGGCCTCC | |
| | ACCCTGATGGAGATGAAGGCCTACCACGCCATCTCCCGGGCCCTGGAGAAGGAGGGCCTGAAGGACAAGAAGTCCCCCCTGAACCT | |
| | GTCCCCCGAGCTGCAGGACGAGATCGGCACCGCCTTCTCCCTGTTCAAGACCGACGAGGACATCACCGGCCGGCTGAAGGACCGGA | |
| | TCCAGCCCGAGATCCTGGAGGCCCTGCTGAAGCACATCTCCTTCGACAAGTTCGTGCAGATCTCCCTGAAGGCCCTGCGGCGGATC | |
| | GTGCCCCTGATGGAGCAGGGCAAGCGGTACGACGAGGCCTGCGCCGAGATCTACGGCGACCACTACGGCAAGAAGAACACCGAGGA | |
| | GAAGATCTACCTGCCCCCCATCCCCGCCGACGAGATCCGGAACCCCGTGGTGCTGCGGGCCCTGTCCCAGGCCCGGAAGGTGATCA | |
| | ACGGCGTGGTGCGGCGGTACGGCTCCCCCGCCCGGATCCACATCGAGACCGCCCGGGAGGTGGGCAAGTCCTTCAAGGACCGGAAG | |
| | GAGATCGAGAAGCGGCAGGAGGAGAACCGGAAGGACCGGGAGAAGGCCGCCGCCAAGTTCCGGGAGTACTTCCCCAACTTCGTGGG | |
| | CGAGCCCAAGTCCAAGGACATCCTGAAGCTGCGGCTGTACGAGCAGCAGCACGGCAAGTGCCTGTACTCCGGCAAGGAGATCAACC | |
| | TGGGCCGGCTGAACGAGAAGGGCTACGTGGAGATCGACCACGCCCTGCCCTTCTCCCGGACCTGGGACGACTCCTTCAACAACAAG | |
| | GTGCTGGTGCTGGGCTCCGAGAACCAGAACAAGGGCAACCAGACCCCCTACGAGTACTTCAACGGCAAGGACAACTCCCGGGAGTG | |
| | GCAGGAGTTCAAGGCCCGGGTGGAGACCTCCCGGTTCCCCCGGTCCAAGAAGCAGCGGATCCTGCTGCAGAAGTTCGACGAGGACG | |
| | GCTTCAAGGAGCGGAACCTGAACGACACCCGGTACGTGAACCGGTTCCTGTGCCAGTTCGTGGCCGACCGGATGCGGCTGACCGGC | |
| | AAGGGCAAGAAGCGGGTGTTCGCCTCCAACGGCCAGATCACCAACCTGCTGCGGGGCTTCTGGGGCCTGCGGAAGGTGCGGGCCGA | |
| | GAACGACCGGCACCACGCCCTGGACGCCGTGGTGGTGGCCTGCTCCACCGTGGCCATGCAGCAGAAGATCACCCGGTTCGTGCGGT | |
| | ACAAGGAGATGAACGCCTTCGACGGCAAGACCATCGACAAGGAGACCGGCGAGGTGCTGCACCAGAAGACCCACTTCCCCCAGCCC | |
| | TGGGAGTTCTTCGCCCAGGAGGTGATGATCCGGGTGTTCGGCAAGCCCGACGGCAAGCCCGAGTTCGAGGAGGCCGACACCCTGGA | |
| | GAAGCTGCGGACCCTGCTGGCCGAGAAGCTGTCCTCCCGGCCCGAGGCCGTGCACGAGTACGTGACCCCCCTGTTCGTGTCCCGGG | |
| | CCCCCAACCGGAAGATGTCCGGCCAGGGCCACATGGAGACCGTGAAGTCCGCCAAGCGGCTGGACGAGGGCGTGTCCGTGCTGCGG | |
| | GTGCCCCTGACCCAGCTGAAGCTGAAGGACCTGGAGAAGATGGTGAACCGGGAGCGGGAGCCCAAGCTGTACGAGGCCCTGAAGGC | |
| | CCGGCTGGAGGCCCACAAGGACGACCCCGCCAAGGCCTTCGCCGAGCCCTTCTACAAGTACGACAAGGCCGGCAACCGGACCCAGC | |
| | AGGTGAAGGCCGTGCGGGTGGAGCAGGTGCAGAAGACCGGCGTGTGGGTGCGGAACCACAACGGCATCGCCGACAACGCCACCATG | |
| | GTGCGGGTGGACGTGTTCGAGAAGGGCGACAAGTACTACCTGGTGCCCATCTACTCCTGGCAGGTGGCCAAGGGCATCCTGCCCGA | |
| | CCGGGCCGTGGTGCAGGGCAAGGACGAGGAGGACTGGCAGCTGATCGACGACTCCTTCAACTTCAAGTTCTCCCTGCACCCCAACG | |
| | ACCTGGTGGAGGTGATCACCAAGAAGGCCCGGATGTTCGGCTACTTCGCCTCCTGCCACCGGGGCACCGGCAACATCAACATCCGG | |
| | ATCCACGACCTGGACCACAAGATCGGCAAGAACGGCATCCTGGAGGGCATCGGCGTGAAGACCGCCCTGTCCTTCCAGAAGTACCA | |
| | GATCGACGAGCTGGGCAAGGAGATCCGGCCCTGCCGGCTGAAGAAGCGGCCCCCCGTGCGGTCCGGCAAGCGGACCGCCGACGGCT | |
| | CCGAGTTCGAGTCCCCCAAGAAGAAGCGGAAGGTGGAG | |
| Nme Cas9 ORF | GCCGCCTTCAAGCCCAACAGCATCAACTACATCCTGGGCCTGGACATCGGCATCGCCAGCGTGGGCTGGGCCATGGTGGAGATCGA | 364 |
| using low | CGAGGAGGAGAACCCCATCCGGCTGATCGACCTGGGCGTGCGGGTGTTCGAGCGGGCCGAGGTGCCCAAGACCGGCGACAGCCTGG | |
| A/U codons | CCATGGCCCGGCGGCTGGCCCGGAGCGTGCGGCGGCTGACCCGGCGGCGGGCCCACCGGCTGCTGCGGACCCGGCGGCTGCTGAAG | |
| of Table 4 | CGGGAGGGCGTGCTGCAGGCCGCCAACTTCGACGAGAACGGCCTGATCAAGAGCCTGCCCAACACCCCCTGGCAGCTGCGGGCCGC | |
| (no start or | CGCCCTGGACCGGAAGCTGACCCCCCTGGAGTGGAGCGCCGTGCTGCTGCACCTGATCAAGCACCGGGGCTACCTGAGCCAGCGGA | |
| stop codons; | AGAACGAGGGCGAGACCGCCGACAAGGAGCTGGGCGCCCTGCTGAAGGGCGTGGCCGGCAACGCCCACGCCCTGCAGACCGGCGAC | |
| suitable for | TTCCGGACCCCCGCCGAGCTGGCCCTGAACAAGTTCGAGAAGGAGAGCGGCCACATCCGGAACCAGCGGAGCGACTACAGCCACAC | |
| inclusion in | CTTCAGCCGGAAGGACCTGCAGGCCGAGCTGATCCTGCTGTTCGAGAAGCAGAAGGAGTTCGGCAACCCCCACGTGAGCGGCGGCC | |
| fusion | TGAAGGAGGGCATCGAGACCCTGCTGATGACCCAGCGGCCCGCCCTGAGCGGCGACGCCGTGCAGAAGATGCTGGGCCACTGCACC | |
| protein | TTCGAGCCCGCCGAGCCCAAGGCCGCCAAGAACACCTACACCGCCGAGCGGTTCATCTGGCTGACCAAGCTGAACAACCTGCGGAT | |
| coding | CCTGGAGCAGGGCAGCGAGCGGCCCCTGACCGACACCGAGCGGGCCACCCTGATGGACGAGCCCTACCGGAAGAGCAAGCTGACCT | |
| sequence) | ACGCCCAGGCCCGGAAGCTGCTGGGCCTGGAGGACACCGCCTTCTTCAAGGGCCTGCGGTACGGCAAGGACAACGCCGAGGCCAGC | |
| | ACCCTGATGGAGATGAAGGCCTACCACGCCATCAGCCGGGCCCTGGAGAAGGAGGGCCTGAAGGACAAGAAGAGCCCCCTGAACCT | |
| | GAGCCCCGAGCTGCAGGACGAGATCGGCACCGCCTTCAGCCTGTTCAAGACCGACGAGGACATCACCGGCCGGCTGAAGGACCGGA | |
| | TCCAGCCCGAGATCCTGGAGGCCCTGCTGAAGCACATCAGCTTCGACAAGTTCGTGCAGATCAGCCTGAAGGCCCTGCGGCGGATC | |
| | GTGCCCCTGATGGAGCAGGGCAAGCGGTACGACGAGGCCTGCGCCGAGATCTACGGCGACCACTACGGCAAGAAGAACACCGAGGA | |
| | GAAGATCTACCTGCCCCCCATCCCCGCCGACGAGATCCGGAACCCCGTGGTGCTGCGGGCCCTGAGCCAGGCCCGGAAGGTGATCA | |
| | ACGGCGTGGTGCGGCGGTACGGCAGCCCCGCCCGGATCCACATCGAGACCGCCCGGGAGGTGGGCAAGAGCTTCAAGGACCGGAAG | |
| | GAGATCGAGAAGCGGCAGGAGGAGAACCGGAAGGACCGGGAGAAGGCCGCCGCCAAGTTCCGGGAGTACTTCCCCAACTTCGTGGG | |
| | CGAGCCCAAGAGCAAGGACATCCTGAAGCTGCGGCTGTACGAGCAGCAGCACGGCAAGTGCCTGTACAGCGGCAAGGAGATCAACC | |
| | TGGGCCGGCTGAACGAGAAGGGCTACGTGGAGATCGACCACGCCCTGCCCTTCAGCCGGACCTGGGACGACAGCTTCAACAACAAG | |
| | GTGCTGGTGCTGGGCAGCGAGAACCAGAACAAGGGCAACCAGACCCCCTACGAGTACTTCAACGGCAAGGACAACAGCCGGGAGTG | |
| | GCAGGAGTTCAAGGCCCGGGTGGAGACCAGCCGGTTCCCCCGGAGCAAGAAGCAGCGGATCCTGCTGCAGAAGTTCGACGAGGACG | |
| | GCTTCAAGGAGCGGAACCTGAACGACACCCGGTACGTGAACCGGTTCCTGTGCCAGTTCGTGGCCGACCGGATGCGGCTGACCGGC | |
| | AAGGGCAAGAAGCGGGTGTTCGCCAGCAACGGCCAGATCACCAACCTGCTGCGGGGCTTCTGGGGCCTGCGGAAGGTGCGGGCCGA | |
| | GAACGACCGGCACCACGCCCTGGACGCCGTGGTGGTGGCCTGCAGCACCGTGGCCATGCAGCAGAAGATCACCCGGTTCGTGCGGT | |
| | ACAAGGAGATGAACGCCTTCGACGGCAAGACCATCGACAAGGAGACCGGCGAGGTGCTGCACCAGAAGACCCACTTCCCCCAGCCC | |
| | TGGGAGTTCTTCGCCCAGGAGGTGATGATCCGGGTGTTCGGCAAGCCCGACGGCAAGCCCGAGTTCGAGGAGGCCGACACCCTGGA | |
| | GAAGCTGCGGACCCTGCTGGCCGAGAAGCTGAGCAGCCGGCCCGAGGCCGTGCACGAGTACGTGACCCCCCTGTTCGTGAGCCGGG | |
| | CCCCCAACCGGAAGATGAGCGGCCAGGGCCACATGGAGACCGTGAAGAGCGCCAAGCGGCTGGACGAGGGCGTGAGCGTGCTGCGG | |
| | GTGCCCCTGACCCAGCTGAAGCTGAAGGACCTGGAGAAGATGGTGAACCGGGAGCGGGAGCCCAAGCTGTACGAGGCCCTGAAGGC | |
| | CCGGCTGGAGGCCCACAAGGACGACCCCGCCAAGGCCTTCGCCGAGCCCTTCTACAAGTACGACAAGGCCGGCAACCGGACCCAGC | |
| | AGGTGAAGGCCGTGCGGGTGGAGCAGGTGCAGAAGACCGGCGTGTGGGTGCGGAACCACAACGGCATCGCCGACAACGCCACCATG | |
| | GTGCGGGTGGACGTGTTCGAGAAGGGCGACAAGTACTACCTGGTGCCCATCTACAGCTGGCAGGTGGCCAAGGGCATCCTGCCCGA | |
| | CCGGGCCGTGGTGCAGGGCAAGGACGAGGAGGACTGGCAGCTGATCGACGACAGCTTCAACTTCAAGTTCAGCCTGCACCCCAACG | |
| | ACCTGGTGGAGGTGATCACCAAGAAGGCCCGGATGTTCGGCTACTTCGCCAGCTGCCACCGGGGCACCGGCAACATCAACATCCGG | |
| | ATCCACGACCTGGACCACAAGATCGGCAAGAACGGCATCCTGGAGGGCATCGGCGTGAAGACCGCCCTGAGCTTCCAGAAGTACCA | |
| | GATCGACGAGCTGGGCAAGGAGATCCGGCCCTGCCGGCTGAAGAAGCGGCCCCCCGTGCGGAGCGGCAAGCGGACCGCCGACGGCA | |
| | GCGAGTTCGAGAGCCCCAAGAAGAAGCGGAAGGTGGAG | |
| Open reading | GACAAGAAGTACAGCATCGGACTGGACATCGGAACAAACAGCGTCGGATGGGCAGTCATCACAGACGAATACAAGGTCCCGAGCAA | 365 |
| frame for | GAAGTTCAAGGTCCTGGGAAACACAGACAGACACAGCATCAAGAAGAACCTGATCGGAGCACTGCTGTTCGACAGCGGAGAAACAG | |
| Cas9 with | CAGAAGCAACAAGACTGAAGAGAACAGCAAGAAGAAGATACACAAGAAGAAAGAACAGAATCTGCTACCTGCAGGAAATCTTCAGC | |
| NLS1 (no | AACGAAATGGCAAAGGTCGACGACAGCTTCTTCCACAGACTGGAAGAAAGCTTCCTGGTCGAAGAAGACAAGAAGCACGAAAGACA | |
| start or | CCCGATCTTCGGAAACATCGTCGACGAAGTCGCATACCACGAAAAGTACCCGACAATCTACCACCTGAGAAAGAAGCTGGTCGACA | |
| stop codons; | GCACAGACAAGGCAGACCTGAGACTGATCTACCTGGCACTGGCACACATGATCAAGTTCAGAGGACACTTCCTGATCGAAGGAGAC | |
| suitable for | CTGAACCCGGACAACAGCGACGTCGACAAGCTGTTCATCCAGCTGGTCCAGACATACAACCAGCTGTTCGAAGAAAACCCGATCAA | |
| inclusion in | CGCAAGCGGAGTCGACGCAAAGGCAATCCTGAGCGCAAGACTGAGCAAGAGCAGAAGACTGGAAAACCTGATCGCACAGCTGCCGG | |
| fusion | GAGAAAAGAAGAACGGACTGTTCGGAAACCTGATCGCACTGAGCCTGGGACTGACACCGAACTTCAAGAGCAACTTCGACCTGGCA | |
| protein | GAAGACGCAAAGCTGCAGCTGAGCAAGGACACATACGACGACGACCTGGACAACCTGCTGGCACAGATCGGAGACCAGTACGCAGA | |
| coding | CCTGTTCCTGGCAGCAAAGAACCTGAGCGACGCAATCCTGCTGAGCGACATCCTGAGAGTCAACACAGAAATCACAAAGGCACCGC | |
| sequence) | TGAGCGCAAGCATGATCAAGAGATACGACGAACACCACCAGGACCTGACACTGCTGAAGGCACTGGTCAGACAGCAGCTGCCGGAA | |
| | AAGTACAAGGAAATCTTCTTCGACCAGAGCAAGAACGGATACGCAGGATACATCGACGGAGGAGCAAGCCAGGAAGAATTCTACAA | |
| | GTTCATCAAGCCGATCCTGGAAAAGATGGACGGAACAGAAGAACTGCTGGTCAAGCTGAACAGAGAAGACCTGCTGAGAAAGCAGA | |
| | GAACATTCGACAACGGAAGCATCCCGCACCAGATCCACCTGGGAGAACTGCACGCAATCCTGAGAAGACAGGAAGACTTCTACCCG | |
| | TTCCTGAAGGACAACAGAGAAAAGATCGAAAAGATCCTGACATTCAGAATCCCGTACTACGTCGGACCGCTGGCAAGAGGAAACAG | |
| | CAGATTCGCATGGATGACAAGAAAGAGCGAAGAAACAATCACACCGTGGAACTTCGAAGAAGTCGTCGACAAGGGAGCAAGCGCAC | |
| | AGAGCTTCATCGAAAGAATGACAAACTTCGACAAGAACCTGCCGAACGAAAAGGTCCTGCCGAAGCACAGCCTGCTGTACGAATAC | |
| | TTCACAGTCTACAACGAACTGACAAAGGTCAAGTACGTCACAGAAGGAATGAGAAAGCCGGCATTCCTGAGCGGAGAACAGAAGAA | |
| | GGCAATCGTCGACCTGCTGTTCAAGACAAACAGAAAGGTCACAGTCAAGCAGCTGAAGGAAGACTACTTCAAGAAGATCGAATGCT | |
| | TCGACAGCGTCGAAATCAGCGGAGTCGAAGACAGATTCAACGCAAGCCTGGGAACATACCACGACCTGCTGAAGATCATCAAGGAC | |
| | AAGGACTTCCTGGACAACGAAGAAAACGAAGACATCCTGGAAGACATCGTCCTGACACTGACACTGTTCGAAGACAGAGAAATGAT | |
| | CGAAGAAAGACTGAAGACATACGCACACCTGTTCGACGACAAGGTCATGAAGCAGCTGAAGAGAAGAAGATACACAGGATGGGGAA | |
| | GACTGAGCAGAAAGCTGATCAACGGAATCAGAGACAAGCAGAGCGGAAAGACAATCCTGGACTTCCTGAAGAGCGACGGATTCGCA | |
| | AACAGAAACTTCATGCAGCTGATCCACGACGACAGCCTGACATTCAAGGAAGACATCCAGAAGGCACAGGTCAGCGGACAGGGAGA | |
| | CAGCCTGCACGAACACATCGCAAACCTGGCAGGAAGCCCGGCAATCAAGAAGGGAATCCTGCAGACAGTCAAGGTCGTCGACGAAC | |
| | TGGTCAAGGTCATGGGAAGACACAAGCCGGAAAACATCGTCATCGAAATGGCAAGAGAAAACCAGACAACACAGAAGGGACAGAAG | |
| | AACAGCAGAGAAAGAATGAAGAGAATCGAAGAAGGAATCAAGGAACTGGGAAGCCAGATCCTGAAGGAACACCCGGTCGAAAACAC | |
| | ACAGCTGCAGAACGAAAAGCTGTACCTGTACTACCTGCAGAACGGAAGAGACATGTACGTCGACCAGGAACTGGACATCAACAGAC | |
| | TGAGCGACTACGACGTCGACCACATCGTCCCGCAGAGCTTCCTGAAGGACGACAGCATCGACAACAAGGTCCTGACAAGAAGCGAC | |
| | AAGAACAGAGGAAAGAGCGACAACGTCCCGAGCGAAGAAGTCGTCAAGAAGATGAAGAACTACTGGAGACAGCTGCTGAACGCAAA | |
| | GCTGATCACACAGAGAAAGTTCGACAACCTGACAAAGGCAGAGAGAGGAGGACTGAGCGAACTGGACAAGGCAGGATTCATCAAGA | |
| | GACAGCTGGTCGAAACAAGACAGATCACAAAGCACGTCGCACAGATCCTGGACAGCAGAATGAACACAAAGTACGACGAAAACGAC | |
| | AAGCTGATCAGAGAAGTCAAGGTCATCACACTGAAGAGCAAGCTGGTCAGCGACTTCAGAAAGGACTTCCAGTTCTACAAGGTCAG | |
| | AGAAATCAACAACTACCACCACGCACACGACGCATACCTGAACGCAGTCGTCGGAACAGCACTGATCAAGAAGTACCCGAAGCTGG | |
| | AAAGCGAATTCGTCTACGGAGACTACAAGGTCTACGACGTCAGAAAGATGATCGCAAAGAGCGAACAGGAAATCGGAAAGGCAACA | |
| | GCAAAGTACTTCTTCTACAGCAACATCATGAACTTCTTCAAGACAGAAATCACACTGGCAAACGGAGAAATCAGAAAGAGACCGCT | |
| | GATCGAAACAAACGGAGAAACAGGAGAAATCGTCTGGGACAAGGGAAGAGACTTCGCAACAGTCAGAAAGGTCCTGAGCATGCCGC | |
| | AGGTCAACATCGTCAAGAAGACAGAAGTCCAGACAGGAGGATTCAGCAAGGAAAGCATCCTGCCGAAGAGAAACAGCGACAAGCTG | |
| | ATCGCAAGAAAGAAGGACTGGGACCCGAAGAAGTACGGAGGATTCGACAGCCCGACAGTCGCATACAGCGTCCTGGTCGTCGCAAA | |
| | GGTCGAAAAGGGAAAGAGCAAGAAGCTGAAGAGCGTCAAGGAACTGCTGGGAATCACAATCATGGAAAGAAGCAGCTTCGAAAAGA | |
| | ACCCGATCGACTTCCTGGAAGCAAAGGGATACAAGGAAGTCAAGAAGGACCTGATCATCAAGCTGCCGAAGTACAGCCTGTTCGAA | |
| | CTGGAAAACGGAAGAAAGAGAATGCTGGCAAGCGCAGGAGAACTGCAGAAGGGAAACGAACTGGCACTGCCGAGCAAGTACGTCAA | |
| | CTTCCTGTACCTGGCAAGCCACTACGAAAAGCTGAAGGGAAGCCCGGAAGACAACGAACAGAAGCAGCTGTTCGTCGAACAGCACA | |
| | AGCACTACCTGGACGAAATCATCGAACAGATCAGCGAATTCAGCAAGAGAGTCATCCTGGCAGACGCAAACCTGGACAAGGTCCTG | |
| | AGCGCATACAACAAGCACAGAGACAAGCCGATCAGAGAACAGGCAGAAAACATCATCCACCTGTTCACACTGACAAACCTGGGAGC | |
| | ACCGGCAGCATTCAAGTACTTCGACACAACAATCGACAGAAAGAGATACACAAGCACAAAGGAAGTCCTGGACGCAACACTGATCC | |
| | ACCAGAGCATCACAGGACTGTACGAAACAAGAATCGACCTGAGCCAGCTGGGAGGAGACGGAGGAGGAAGCCTGGCAGCAAAGAGA | |
| | AGCAGAACAACA | |
| Open reading | GACAAGAAGTACAGCATCGGACTGGACATCGGAACAAACAGCGTCGGATGGGCAGTCATCACAGACGAATACAAGGTCCCGAGCAA | 366 |
| frame for | GAAGTTCAAGGTCCTGGGAAACACAGACAGACACAGCATCAAGAAGAACCTGATCGGAGCACTGCTGTTCGACAGCGGAGAAACAG | |
| Cas9 with | CAGAAGCAACAAGACTGAAGAGAACAGCAAGAAGAAGATACACAAGAAGAAAGAACAGAATCTGCTACCTGCAGGAAATCTTCAGC | |
| NLS2 (no | AACGAAATGGCAAAGGTCGACGACAGCTTCTTCCACAGACTGGAAGAAAGCTTCCTGGTCGAAGAAGACAAGAAGCACGAAAGACA | |
| start or | CCCGATCTTCGGAAACATCGTCGACGAAGTCGCATACCACGAAAAGTACCCGACAATCTACCACCTGAGAAAGAAGCTGGTCGACA | |
| stop codons; | GCACAGACAAGGCAGACCTGAGACTGATCTACCTGGCACTGGCACACATGATCAAGTTCAGAGGACACTTCCTGATCGAAGGAGAC | |
| suitable for | CTGAACCCGGACAACAGCGACGTCGACAAGCTGTTCATCCAGCTGGTCCAGACATACAACCAGCTGTTCGAAGAAAACCCGATCAA | |
| inclusion in | CGCAAGCGGAGTCGACGCAAAGGCAATCCTGAGCGCAAGACTGAGCAAGAGCAGAAGACTGGAAAACCTGATCGCACAGCTGCCGG | |
| fusion | GAGAAAAGAAGAACGGACTGTTCGGAAACCTGATCGCACTGAGCCTGGGACTGACACCGAACTTCAAGAGCAACTTCGACCTGGCA | |
| protein | GAAGACGCAAAGCTGCAGCTGAGCAAGGACACATACGACGACGACCTGGACAACCTGCTGGCACAGATCGGAGACCAGTACGCAGA | |
| coding | CCTGTTCCTGGCAGCAAAGAACCTGAGCGACGCAATCCTGCTGAGCGACATCCTGAGAGTCAACACAGAAATCACAAAGGCACCGC | |
| sequence) | TGAGCGCAAGCATGATCAAGAGATACGACGAACACCACCAGGACCTGACACTGCTGAAGGCACTGGTCAGACAGCAGCTGCCGGAA | |
| | AAGTACAAGGAAATCTTCTTCGACCAGAGCAAGAACGGATACGCAGGATACATCGACGGAGGAGCAAGCCAGGAAGAATTCTACAA | |
| | GTTCATCAAGCCGATCCTGGAAAAGATGGACGGAACAGAAGAACTGCTGGTCAAGCTGAACAGAGAAGACCTGCTGAGAAAGCAGA | |
| | GAACATTCGACAACGGAAGCATCCCGCACCAGATCCACCTGGGAGAACTGCACGCAATCCTGAGAAGACAGGAAGACTTCTACCCG | |
| | TTCCTGAAGGACAACAGAGAAAAGATCGAAAAGATCCTGACATTCAGAATCCCGTACTACGTCGGACCGCTGGCAAGAGGAAACAG | |
| | CAGATTCGCATGGATGACAAGAAAGAGCGAAGAAACAATCACACCGTGGAACTTCGAAGAAGTCGTCGACAAGGGAGCAAGCGCAC | |
| | AGAGCTTCATCGAAAGAATGACAAACTTCGACAAGAACCTGCCGAACGAAAAGGTCCTGCCGAAGCACAGCCTGCTGTACGAATAC | |
| | TTCACAGTCTACAACGAACTGACAAAGGTCAAGTACGTCACAGAAGGAATGAGAAAGCCGGCATTCCTGAGCGGAGAACAGAAGAA | |
| | GGCAATCGTCGACCTGCTGTTCAAGACAAACAGAAAGGTCACAGTCAAGCAGCTGAAGGAAGACTACTTCAAGAAGATCGAATGCT | |
| | TCGACAGCGTCGAAATCAGCGGAGTCGAAGACAGATTCAACGCAAGCCTGGGAACATACCACGACCTGCTGAAGATCATCAAGGAC | |
| | AAGGACTTCCTGGACAACGAAGAAAACGAAGACATCCTGGAAGACATCGTCCTGACACTGACACTGTTCGAAGACAGAGAAATGAT | |
| | CGAAGAAAGACTGAAGACATACGCACACCTGTTCGACGACAAGGTCATGAAGCAGCTGAAGAGAAGAAGATACACAGGATGGGGAA | |
| | GACTGAGCAGAAAGCTGATCAACGGAATCAGAGACAAGCAGAGCGGAAAGACAATCCTGGACTTCCTGAAGAGCGACGGATTCGCA | |
| | AACAGAAACTTCATGCAGCTGATCCACGACGACAGCCTGACATTCAAGGAAGACATCCAGAAGGCACAGGTCAGCGGACAGGGAGA | |
| | CAGCCTGCACGAACACATCGCAAACCTGGCAGGAAGCCCGGCAATCAAGAAGGGAATCCTGCAGACAGTCAAGGTCGTCGACGAAC | |
| | TGGTCAAGGTCATGGGAAGACACAAGCCGGAAAACATCGTCATCGAAATGGCAAGAGAAAACCAGACAACACAGAAGGGACAGAAG | |
| | AACAGCAGAGAAAGAATGAAGAGAATCGAAGAAGGAATCAAGGAACTGGGAAGCCAGATCCTGAAGGAACACCCGGTCGAAAACAC | |
| | ACAGCTGCAGAACGAAAAGCTGTACCTGTACTACCTGCAGAACGGAAGAGACATGTACGTCGACCAGGAACTGGACATCAACAGAC | |
| | TGAGCGACTACGACGTCGACCACATCGTCCCGCAGAGCTTCCTGAAGGACGACAGCATCGACAACAAGGTCCTGACAAGAAGCGAC | |
| | AAGAACAGAGGAAAGAGCGACAACGTCCCGAGCGAAGAAGTCGTCAAGAAGATGAAGAACTACTGGAGACAGCTGCTGAACGCAAA | |
| | GCTGATCACACAGAGAAAGTTCGACAACCTGACAAAGGCAGAGAGAGGAGGACTGAGCGAACTGGACAAGGCAGGATTCATCAAGA | |
| | GACAGCTGGTCGAAACAAGACAGATCACAAAGCACGTCGCACAGATCCTGGACAGCAGAATGAACACAAAGTACGACGAAAACGAC | |
| | AAGCTGATCAGAGAAGTCAAGGTCATCACACTGAAGAGCAAGCTGGTCAGCGACTTCAGAAAGGACTTCCAGTTCTACAAGGTCAG | |
| | AGAAATCAACAACTACCACCACGCACACGACGCATACCTGAACGCAGTCGTCGGAACAGCACTGATCAAGAAGTACCCGAAGCTGG | |
| | AAAGCGAATTCGTCTACGGAGACTACAAGGTCTACGACGTCAGAAAGATGATCGCAAAGAGCGAACAGGAAATCGGAAAGGCAACA | |
| | GCAAAGTACTTCTTCTACAGCAACATCATGAACTTCTTCAAGACAGAAATCACACTGGCAAACGGAGAAATCAGAAAGAGACCGCT | |
| | GATCGAAACAAACGGAGAAACAGGAGAAATCGTCTGGGACAAGGGAAGAGACTTCGCAACAGTCAGAAAGGTCCTGAGCATGCCGC | |
| | AGGTCAACATCGTCAAGAAGACAGAAGTCCAGACAGGAGGATTCAGCAAGGAAAGCATCCTGCCGAAGAGAAACAGCGACAAGCTG | |
| | ATCGCAAGAAAGAAGGACTGGGACCCGAAGAAGTACGGAGGATTCGACAGCCCGACAGTCGCATACAGCGTCCTGGTCGTCGCAAA | |
| | GGTCGAAAAGGGAAAGAGCAAGAAGCTGAAGAGCGTCAAGGAACTGCTGGGAATCACAATCATGGAAAGAAGCAGCTTCGAAAAGA | |
| | ACCCGATCGACTTCCTGGAAGCAAAGGGATACAAGGAAGTCAAGAAGGACCTGATCATCAAGCTGCCGAAGTACAGCCTGTTCGAA | |
| | CTGGAAAACGGAAGAAAGAGAATGCTGGCAAGCGCAGGAGAACTGCAGAAGGGAAACGAACTGGCACTGCCGAGCAAGTACGTCAA | |
| | CTTCCTGTACCTGGCAAGCCACTACGAAAAGCTGAAGGGAAGCCCGGAAGACAACGAACAGAAGCAGCTGTTCGTCGAACAGCACA | |
| | AGCACTACCTGGACGAAATCATCGAACAGATCAGCGAATTCAGCAAGAGAGTCATCCTGGCAGACGCAAACCTGGACAAGGTCCTG | |
| | AGCGCATACAACAAGCACAGAGACAAGCCGATCAGAGAACAGGCAGAAAACATCATCCACCTGTTCACACTGACAAACCTGGGAGC | |
| | ACCGGCAGCATTCAAGTACTTCGACACAACAATCGACAGAAAGAGATACACAAGCACAAAGGAAGTCCTGGACGCAACACTGATCC | |
| | ACCAGAGCATCACAGGACTGTACGAAACAAGAATCGACCTGAGCCAGCTGGGAGGAGACGGAGGAGGAAGCCAGGCAGCAAAGAGA | |
| | AGCAGAACAACA | |
| Open reading | GACAAGAAGTACAGCATCGGACTGGACATCGGAACAAACAGCGTCGGATGGGCAGTCATCACAGACGAATACAAGGTCCCGAGCAA | 367 |
| frame for | GAAGTTCAAGGTCCTGGGAAACACAGACAGACACAGCATCAAGAAGAACCTGATCGGAGCACTGCTGTTCGACAGCGGAGAAACAG | |
| Cas9 with | CAGAAGCAACAAGACTGAAGAGAACAGCAAGAAGAAGATACACAAGAAGAAAGAACAGAATCTGCTACCTGCAGGAAATCTTCAGC | |
| NLS3 (no | AACGAAATGGCAAAGGTCGACGACAGCTTCTTCCACAGACTGGAAGAAAGCTTCCTGGTCGAAGAAGACAAGAAGCACGAAAGACA | |
| start or | CCCGATCTTCGGAAACATCGTCGACGAAGTCGCATACCACGAAAAGTACCCGACAATCTACCACCTGAGAAAGAAGCTGGTCGACA | |
| stop codons; | GCACAGACAAGGCAGACCTGAGACTGATCTACCTGGCACTGGCACACATGATCAAGTTCAGAGGACACTTCCTGATCGAAGGAGAC | |
| suitable for | CTGAACCCGGACAACAGCGACGTCGACAAGCTGTTCATCCAGCTGGTCCAGACATACAACCAGCTGTTCGAAGAAAACCCGATCAA | |
| inclusion in | CGCAAGCGGAGTCGACGCAAAGGCAATCCTGAGCGCAAGACTGAGCAAGAGCAGAAGACTGGAAAACCTGATCGCACAGCTGCCGG | |
| fusion | GAGAAAAGAAGAACGGACTGTTCGGAAACCTGATCGCACTGAGCCTGGGACTGACACCGAACTTCAAGAGCAACTTCGACCTGGCA | |
| protein | GAAGACGCAAAGCTGCAGCTGAGCAAGGACACATACGACGACGACCTGGACAACCTGCTGGCACAGATCGGAGACCAGTACGCAGA | |
| coding | CCTGTTCCTGGCAGCAAAGAACCTGAGCGACGCAATCCTGCTGAGCGACATCCTGAGAGTCAACACAGAAATCACAAAGGCACCGC | |
| sequence) | TGAGCGCAAGCATGATCAAGAGATACGACGAACACCACCAGGACCTGACACTGCTGAAGGCACTGGTCAGACAGCAGCTGCCGGAA | |
| | AAGTACAAGGAAATCTTCTTCGACCAGAGCAAGAACGGATACGCAGGATACATCGACGGAGGAGCAAGCCAGGAAGAATTCTACAA | |
| | GTTCATCAAGCCGATCCTGGAAAAGATGGACGGAACAGAAGAACTGCTGGTCAAGCTGAACAGAGAAGACCTGCTGAGAAAGCAGA | |
| | GAACATTCGACAACGGAAGCATCCCGCACCAGATCCACCTGGGAGAACTGCACGCAATCCTGAGAAGACAGGAAGACTTCTACCCG | |
| | TTCCTGAAGGACAACAGAGAAAAGATCGAAAAGATCCTGACATTCAGAATCCCGTACTACGTCGGACCGCTGGCAAGAGGAAACAG | |
| | CAGATTCGCATGGATGACAAGAAAGAGCGAAGAAACAATCACACCGTGGAACTTCGAAGAAGTCGTCGACAAGGGAGCAAGCGCAC | |
| | AGAGCTTCATCGAAAGAATGACAAACTTCGACAAGAACCTGCCGAACGAAAAGGTCCTGCCGAAGCACAGCCTGCTGTACGAATAC | |
| | TTCACAGTCTACAACGAACTGACAAAGGTCAAGTACGTCACAGAAGGAATGAGAAAGCCGGCATTCCTGAGCGGAGAACAGAAGAA | |
| | GGCAATCGTCGACCTGCTGTTCAAGACAAACAGAAAGGTCACAGTCAAGCAGCTGAAGGAAGACTACTTCAAGAAGATCGAATGCT | |
| | TCGACAGCGTCGAAATCAGCGGAGTCGAAGACAGATTCAACGCAAGCCTGGGAACATACCACGACCTGCTGAAGATCATCAAGGAC | |
| | AAGGACTTCCTGGACAACGAAGAAAACGAAGACATCCTGGAAGACATCGTCCTGACACTGACACTGTTCGAAGACAGAGAAATGAT | |
| | CGAAGAAAGACTGAAGACATACGCACACCTGTTCGACGACAAGGTCATGAAGCAGCTGAAGAGAAGAAGATACACAGGATGGGGAA | |
| | GACTGAGCAGAAAGCTGATCAACGGAATCAGAGACAAGCAGAGCGGAAAGACAATCCTGGACTTCCTGAAGAGCGACGGATTCGCA | |
| | AACAGAAACTTCATGCAGCTGATCCACGACGACAGCCTGACATTCAAGGAAGACATCCAGAAGGCACAGGTCAGCGGACAGGGAGA | |
| | CAGCCTGCACGAACACATCGCAAACCTGGCAGGAAGCCCGGCAATCAAGAAGGGAATCCTGCAGACAGTCAAGGTCGTCGACGAAC | |
| | TGGTCAAGGTCATGGGAAGACACAAGCCGGAAAACATCGTCATCGAAATGGCAAGAGAAAACCAGACAACACAGAAGGGACAGAAG | |
| | AACAGCAGAGAAAGAATGAAGAGAATCGAAGAAGGAATCAAGGAACTGGGAAGCCAGATCCTGAAGGAACACCCGGTCGAAAACAC | |
| | ACAGCTGCAGAACGAAAAGCTGTACCTGTACTACCTGCAGAACGGAAGAGACATGTACGTCGACCAGGAACTGGACATCAACAGAC | |
| | TGAGCGACTACGACGTCGACCACATCGTCCCGCAGAGCTTCCTGAAGGACGACAGCATCGACAACAAGGTCCTGACAAGAAGCGAC | |
| | AAGAACAGAGGAAAGAGCGACAACGTCCCGAGCGAAGAAGTCGTCAAGAAGATGAAGAACTACTGGAGACAGCTGCTGAACGCAAA | |
| | GCTGATCACACAGAGAAAGTTCGACAACCTGACAAAGGCAGAGAGAGGAGGACTGAGCGAACTGGACAAGGCAGGATTCATCAAGA | |
| | GACAGCTGGTCGAAACAAGACAGATCACAAAGCACGTCGCACAGATCCTGGACAGCAGAATGAACACAAAGTACGACGAAAACGAC | |
| | AAGCTGATCAGAGAAGTCAAGGTCATCACACTGAAGAGCAAGCTGGTCAGCGACTTCAGAAAGGACTTCCAGTTCTACAAGGTCAG | |
| | AGAAATCAACAACTACCACCACGCACACGACGCATACCTGAACGCAGTCGTCGGAACAGCACTGATCAAGAAGTACCCGAAGCTGG | |
| | AAAGCGAATTCGTCTACGGAGACTACAAGGTCTACGACGTCAGAAAGATGATCGCAAAGAGCGAACAGGAAATCGGAAAGGCAACA | |
| | GCAAAGTACTTCTTCTACAGCAACATCATGAACTTCTTCAAGACAGAAATCACACTGGCAAACGGAGAAATCAGAAAGAGACCGCT | |
| | GATCGAAACAAACGGAGAAACAGGAGAAATCGTCTGGGACAAGGGAAGAGACTTCGCAACAGTCAGAAAGGTCCTGAGCATGCCGC | |
| | AGGTCAACATCGTCAAGAAGACAGAAGTCCAGACAGGAGGATTCAGCAAGGAAAGCATCCTGCCGAAGAGAAACAGCGACAAGCTG | |
| | ATCGCAAGAAAGAAGGACTGGGACCCGAAGAAGTACGGAGGATTCGACAGCCCGACAGTCGCATACAGCGTCCTGGTCGTCGCAAA | |
| | GGTCGAAAAGGGAAAGAGCAAGAAGCTGAAGAGCGTCAAGGAACTGCTGGGAATCACAATCATGGAAAGAAGCAGCTTCGAAAAGA | |
| | ACCCGATCGACTTCCTGGAAGCAAAGGGATACAAGGAAGTCAAGAAGGACCTGATCATCAAGCTGCCGAAGTACAGCCTGTTCGAA | |
| | CTGGAAAACGGAAGAAAGAGAATGCTGGCAAGCGCAGGAGAACTGCAGAAGGGAAACGAACTGGCACTGCCGAGCAAGTACGTCAA | |
| | CTTCCTGTACCTGGCAAGCCACTACGAAAAGCTGAAGGGAAGCCCGGAAGACAACGAACAGAAGCAGCTGTTCGTCGAACAGCACA | |
| | AGCACTACCTGGACGAAATCATCGAACAGATCAGCGAATTCAGCAAGAGAGTCATCCTGGCAGACGCAAACCTGGACAAGGTCCTG | |
| | AGCGCATACAACAAGCACAGAGACAAGCCGATCAGAGAACAGGCAGAAAACATCATCCACCTGTTCACACTGACAAACCTGGGAGC | |
| | ACCGGCAGCATTCAAGTACTTCGACACAACAATCGACAGAAAGAGATACACAAGCACAAAGGAAGTCCTGGACGCAACACTGATCC | |
| | ACCAGAGCATCACAGGACTGTACGAAACAAGAATCGACCTGAGCCAGCTGGGAGGAGACGGAGGAGGAAGCCCGGCACCGGCAAAG | |
| | AGAGAAAGAACAACA | |
| Open reading | GACAAGAAGTACAGCATCGGACTGGACATCGGAACAAACAGCGTCGGATGGGCAGTCATCACAGACGAATACAAGGTCCCGAGCAA | 368 |
| frame for | GAAGTTCAAGGTCCTGGGAAACACAGACAGACACAGCATCAAGAAGAACCTGATCGGAGCACTGCTGTTCGACAGCGGAGAAACAG | |
| Cas9 with | CAGAAGCAACAAGACTGAAGAGAACAGCAAGAAGAAGATACACAAGAAGAAAGAACAGAATCTGCTACCTGCAGGAAATCTTCAGC | |
| NLS4 (no | AACGAAATGGCAAAGGTCGACGACAGCTTCTTCCACAGACTGGAAGAAAGCTTCCTGGTCGAAGAAGACAAGAAGCACGAAAGACA | |
| start or | CCCGATCTTCGGAAACATCGTCGACGAAGTCGCATACCACGAAAAGTACCCGACAATCTACCACCTGAGAAAGAAGCTGGTCGACA | |
| stop codons; | GCACAGACAAGGCAGACCTGAGACTGATCTACCTGGCACTGGCACACATGATCAAGTTCAGAGGACACTTCCTGATCGAAGGAGAC | |
| suitable for | CTGAACCCGGACAACAGCGACGTCGACAAGCTGTTCATCCAGCTGGTCCAGACATACAACCAGCTGTTCGAAGAAAACCCGATCAA | |
| inclusion in | CGCAAGCGGAGTCGACGCAAAGGCAATCCTGAGCGCAAGACTGAGCAAGAGCAGAAGACTGGAAAACCTGATCGCACAGCTGCCGG | |
| fusion | GAGAAAAGAAGAACGGACTGTTCGGAAACCTGATCGCACTGAGCCTGGGACTGACACCGAACTTCAAGAGCAACTTCGACCTGGCA | |
| protein | GAAGACGCAAAGCTGCAGCTGAGCAAGGACACATACGACGACGACCTGGACAACCTGCTGGCACAGATCGGAGACCAGTACGCAGA | |
| coding | CCTGTTCCTGGCAGCAAAGAACCTGAGCGACGCAATCCTGCTGAGCGACATCCTGAGAGTCAACACAGAAATCACAAAGGCACCGC | |
| sequence) | TGAGCGCAAGCATGATCAAGAGATACGACGAACACCACCAGGACCTGACACTGCTGAAGGCACTGGTCAGACAGCAGCTGCCGGAA | |
| | AAGTACAAGGAAATCTTCTTCGACCAGAGCAAGAACGGATACGCAGGATACATCGACGGAGGAGCAAGCCAGGAAGAATTCTACAA | |
| | GTTCATCAAGCCGATCCTGGAAAAGATGGACGGAACAGAAGAACTGCTGGTCAAGCTGAACAGAGAAGACCTGCTGAGAAAGCAGA | |
| | GAACATTCGACAACGGAAGCATCCCGCACCAGATCCACCTGGGAGAACTGCACGCAATCCTGAGAAGACAGGAAGACTTCTACCCG | |
| | TTCCTGAAGGACAACAGAGAAAAGATCGAAAAGATCCTGACATTCAGAATCCCGTACTACGTCGGACCGCTGGCAAGAGGAAACAG | |
| | CAGATTCGCATGGATGACAAGAAAGAGCGAAGAAACAATCACACCGTGGAACTTCGAAGAAGTCGTCGACAAGGGAGCAAGCGCAC | |
| | AGAGCTTCATCGAAAGAATGACAAACTTCGACAAGAACCTGCCGAACGAAAAGGTCCTGCCGAAGCACAGCCTGCTGTACGAATAC | |
| | TTCACAGTCTACAACGAACTGACAAAGGTCAAGTACGTCACAGAAGGAATGAGAAAGCCGGCATTCCTGAGCGGAGAACAGAAGAA | |
| | GGCAATCGTCGACCTGCTGTTCAAGACAAACAGAAAGGTCACAGTCAAGCAGCTGAAGGAAGACTACTTCAAGAAGATCGAATGCT | |
| | TCGACAGCGTCGAAATCAGCGGAGTCGAAGACAGATTCAACGCAAGCCTGGGAACATACCACGACCTGCTGAAGATCATCAAGGAC | |
| | AAGGACTTCCTGGACAACGAAGAAAACGAAGACATCCTGGAAGACATCGTCCTGACACTGACACTGTTCGAAGACAGAGAAATGAT | |
| | CGAAGAAAGACTGAAGACATACGCACACCTGTTCGACGACAAGGTCATGAAGCAGCTGAAGAGAAGAAGATACACAGGATGGGGAA | |
| | GACTGAGCAGAAAGCTGATCAACGGAATCAGAGACAAGCAGAGCGGAAAGACAATCCTGGACTTCCTGAAGAGCGACGGATTCGCA | |
| | AACAGAAACTTCATGCAGCTGATCCACGACGACAGCCTGACATTCAAGGAAGACATCCAGAAGGCACAGGTCAGCGGACAGGGAGA | |
| | CAGCCTGCACGAACACATCGCAAACCTGGCAGGAAGCCCGGCAATCAAGAAGGGAATCCTGCAGACAGTCAAGGTCGTCGACGAAC | |
| | TGGTCAAGGTCATGGGAAGACACAAGCCGGAAAACATCGTCATCGAAATGGCAAGAGAAAACCAGACAACACAGAAGGGACAGAAG | |
| | AACAGCAGAGAAAGAATGAAGAGAATCGAAGAAGGAATCAAGGAACTGGGAAGCCAGATCCTGAAGGAACACCCGGTCGAAAACAC | |
| | ACAGCTGCAGAACGAAAAGCTGTACCTGTACTACCTGCAGAACGGAAGAGACATGTACGTCGACCAGGAACTGGACATCAACAGAC | |
| | TGAGCGACTACGACGTCGACCACATCGTCCCGCAGAGCTTCCTGAAGGACGACAGCATCGACAACAAGGTCCTGACAAGAAGCGAC | |
| | AAGAACAGAGGAAAGAGCGACAACGTCCCGAGCGAAGAAGTCGTCAAGAAGATGAAGAACTACTGGAGACAGCTGCTGAACGCAAA | |
| | GCTGATCACACAGAGAAAGTTCGACAACCTGACAAAGGCAGAGAGAGGAGGACTGAGCGAACTGGACAAGGCAGGATTCATCAAGA | |
| | GACAGCTGGTCGAAACAAGACAGATCACAAAGCACGTCGCACAGATCCTGGACAGCAGAATGAACACAAAGTACGACGAAAACGAC | |
| | AAGCTGATCAGAGAAGTCAAGGTCATCACACTGAAGAGCAAGCTGGTCAGCGACTTCAGAAAGGACTTCCAGTTCTACAAGGTCAG | |
| | AGAAATCAACAACTACCACCACGCACACGACGCATACCTGAACGCAGTCGTCGGAACAGCACTGATCAAGAAGTACCCGAAGCTGG | |
| | AAAGCGAATTCGTCTACGGAGACTACAAGGTCTACGACGTCAGAAAGATGATCGCAAAGAGCGAACAGGAAATCGGAAAGGCAACA | |
| | GCAAAGTACTTCTTCTACAGCAACATCATGAACTTCTTCAAGACAGAAATCACACTGGCAAACGGAGAAATCAGAAAGAGACCGCT | |
| | GATCGAAACAAACGGAGAAACAGGAGAAATCGTCTGGGACAAGGGAAGAGACTTCGCAACAGTCAGAAAGGTCCTGAGCATGCCGC | |
| | AGGTCAACATCGTCAAGAAGACAGAAGTCCAGACAGGAGGATTCAGCAAGGAAAGCATCCTGCCGAAGAGAAACAGCGACAAGCTG | |
| | ATCGCAAGAAAGAAGGACTGGGACCCGAAGAAGTACGGAGGATTCGACAGCCCGACAGTCGCATACAGCGTCCTGGTCGTCGCAAA | |
| | GGTCGAAAAGGGAAAGAGCAAGAAGCTGAAGAGCGTCAAGGAACTGCTGGGAATCACAATCATGGAAAGAAGCAGCTTCGAAAAGA | |
| | ACCCGATCGACTTCCTGGAAGCAAAGGGATACAAGGAAGTCAAGAAGGACCTGATCATCAAGCTGCCGAAGTACAGCCTGTTCGAA | |
| | CTGGAAAACGGAAGAAAGAGAATGCTGGCAAGCGCAGGAGAACTGCAGAAGGGAAACGAACTGGCACTGCCGAGCAAGTACGTCAA | |
| | CTTCCTGTACCTGGCAAGCCACTACGAAAAGCTGAAGGGAAGCCCGGAAGACAACGAACAGAAGCAGCTGTTCGTCGAACAGCACA | |
| | AGCACTACCTGGACGAAATCATCGAACAGATCAGCGAATTCAGCAAGAGAGTCATCCTGGCAGACGCAAACCTGGACAAGGTCCTG | |
| | AGCGCATACAACAAGCACAGAGACAAGCCGATCAGAGAACAGGCAGAAAACATCATCCACCTGTTCACACTGACAAACCTGGGAGC | |
| | ACCGGCAGCATTCAAGTACTTCGACACAACAATCGACAGAAAGAGATACACAAGCACAAAGGAAGTCCTGGACGCAACACTGATCC | |
| | ACCAGAGCATCACAGGACTGTACGAAACAAGAATCGACCTGAGCCAGCTGGGAGGAGACGGAGGAGGAAGCCAGGCAGCAAAGAGA | |
| | CCGAGAACAACA | |
| Open reading | GACAAGAAGTACAGCATCGGACTGGACATCGGAACAAACAGCGTCGGATGGGCAGTCATCACAGACGAATACAAGGTCCCGAGCAA | 369 |
| frame for | GAAGTTCAAGGTCCTGGGAAACACAGACAGACACAGCATCAAGAAGAACCTGATCGGAGCACTGCTGTTCGACAGCGGAGAAACAG | |
| Cas9 with | CAGAAGCAACAAGACTGAAGAGAACAGCAAGAAGAAGATACACAAGAAGAAAGAACAGAATCTGCTACCTGCAGGAAATCTTCAGC | |
| NLS5 (no | AACGAAATGGCAAAGGTCGACGACAGCTTCTTCCACAGACTGGAAGAAAGCTTCCTGGTCGAAGAAGACAAGAAGCACGAAAGACA | |
| start or | CCCGATCTTCGGAAACATCGTCGACGAAGTCGCATACCACGAAAAGTACCCGACAATCTACCACCTGAGAAAGAAGCTGGTCGACA | |
| stop codons; | GCACAGACAAGGCAGACCTGAGACTGATCTACCTGGCACTGGCACACATGATCAAGTTCAGAGGACACTTCCTGATCGAAGGAGAC | |
| suitable for | CTGAACCCGGACAACAGCGACGTCGACAAGCTGTTCATCCAGCTGGTCCAGACATACAACCAGCTGTTCGAAGAAAACCCGATCAA | |
| inclusion in | CGCAAGCGGAGTCGACGCAAAGGCAATCCTGAGCGCAAGACTGAGCAAGAGCAGAAGACTGGAAAACCTGATCGCACAGCTGCCGG | |
| fusion | GAGAAAAGAAGAACGGACTGTTCGGAAACCTGATCGCACTGAGCCTGGGACTGACACCGAACTTCAAGAGCAACTTCGACCTGGCA | |
| protein | GAAGACGCAAAGCTGCAGCTGAGCAAGGACACATACGACGACGACCTGGACAACCTGCTGGCACAGATCGGAGACCAGTACGCAGA | |
| coding | CCTGTTCCTGGCAGCAAAGAACCTGAGCGACGCAATCCTGCTGAGCGACATCCTGAGAGTCAACACAGAAATCACAAAGGCACCGC | |
| sequence) | TGAGCGCAAGCATGATCAAGAGATACGACGAACACCACCAGGACCTGACACTGCTGAAGGCACTGGTCAGACAGCAGCTGCCGGAA | |
| | AAGTACAAGGAAATCTTCTTCGACCAGAGCAAGAACGGATACGCAGGATACATCGACGGAGGAGCAAGCCAGGAAGAATTCTACAA | |
| | GTTCATCAAGCCGATCCTGGAAAAGATGGACGGAACAGAAGAACTGCTGGTCAAGCTGAACAGAGAAGACCTGCTGAGAAAGCAGA | |
| | GAACATTCGACAACGGAAGCATCCCGCACCAGATCCACCTGGGAGAACTGCACGCAATCCTGAGAAGACAGGAAGACTTCTACCCG | |
| | TTCCTGAAGGACAACAGAGAAAAGATCGAAAAGATCCTGACATTCAGAATCCCGTACTACGTCGGACCGCTGGCAAGAGGAAACAG | |
| | CAGATTCGCATGGATGACAAGAAAGAGCGAAGAAACAATCACACCGTGGAACTTCGAAGAAGTCGTCGACAAGGGAGCAAGCGCAC | |
| | AGAGCTTCATCGAAAGAATGACAAACTTCGACAAGAACCTGCCGAACGAAAAGGTCCTGCCGAAGCACAGCCTGCTGTACGAATAC | |
| | TTCACAGTCTACAACGAACTGACAAAGGTCAAGTACGTCACAGAAGGAATGAGAAAGCCGGCATTCCTGAGCGGAGAACAGAAGAA | |
| | GGCAATCGTCGACCTGCTGTTCAAGACAAACAGAAAGGTCACAGTCAAGCAGCTGAAGGAAGACTACTTCAAGAAGATCGAATGCT | |
| | TCGACAGCGTCGAAATCAGCGGAGTCGAAGACAGATTCAACGCAAGCCTGGGAACATACCACGACCTGCTGAAGATCATCAAGGAC | |
| | AAGGACTTCCTGGACAACGAAGAAAACGAAGACATCCTGGAAGACATCGTCCTGACACTGACACTGTTCGAAGACAGAGAAATGAT | |
| | CGAAGAAAGACTGAAGACATACGCACACCTGTTCGACGACAAGGTCATGAAGCAGCTGAAGAGAAGAAGATACACAGGATGGGGAA | |
| | GACTGAGCAGAAAGCTGATCAACGGAATCAGAGACAAGCAGAGCGGAAAGACAATCCTGGACTTCCTGAAGAGCGACGGATTCGCA | |
| | AACAGAAACTTCATGCAGCTGATCCACGACGACAGCCTGACATTCAAGGAAGACATCCAGAAGGCACAGGTCAGCGGACAGGGAGA | |
| | CAGCCTGCACGAACACATCGCAAACCTGGCAGGAAGCCCGGCAATCAAGAAGGGAATCCTGCAGACAGTCAAGGTCGTCGACGAAC | |
| | TGGTCAAGGTCATGGGAAGACACAAGCCGGAAAACATCGTCATCGAAATGGCAAGAGAAAACCAGACAACACAGAAGGGACAGAAG | |
| | AACAGCAGAGAAAGAATGAAGAGAATCGAAGAAGGAATCAAGGAACTGGGAAGCCAGATCCTGAAGGAACACCCGGTCGAAAACAC | |
| | ACAGCTGCAGAACGAAAAGCTGTACCTGTACTACCTGCAGAACGGAAGAGACATGTACGTCGACCAGGAACTGGACATCAACAGAC | |
| | TGAGCGACTACGACGTCGACCACATCGTCCCGCAGAGCTTCCTGAAGGACGACAGCATCGACAACAAGGTCCTGACAAGAAGCGAC | |
| | AAGAACAGAGGAAAGAGCGACAACGTCCCGAGCGAAGAAGTCGTCAAGAAGATGAAGAACTACTGGAGACAGCTGCTGAACGCAAA | |
| | GCTGATCACACAGAGAAAGTTCGACAACCTGACAAAGGCAGAGAGAGGAGGACTGAGCGAACTGGACAAGGCAGGATTCATCAAGA | |
| | GACAGCTGGTCGAAACAAGACAGATCACAAAGCACGTCGCACAGATCCTGGACAGCAGAATGAACACAAAGTACGACGAAAACGAC | |
| | AAGCTGATCAGAGAAGTCAAGGTCATCACACTGAAGAGCAAGCTGGTCAGCGACTTCAGAAAGGACTTCCAGTTCTACAAGGTCAG | |
| | AGAAATCAACAACTACCACCACGCACACGACGCATACCTGAACGCAGTCGTCGGAACAGCACTGATCAAGAAGTACCCGAAGCTGG | |
| | AAAGCGAATTCGTCTACGGAGACTACAAGGTCTACGACGTCAGAAAGATGATCGCAAAGAGCGAACAGGAAATCGGAAAGGCAACA | |
| | GCAAAGTACTTCTTCTACAGCAACATCATGAACTTCTTCAAGACAGAAATCACACTGGCAAACGGAGAAATCAGAAAGAGACCGCT | |
| | GATCGAAACAAACGGAGAAACAGGAGAAATCGTCTGGGACAAGGGAAGAGACTTCGCAACAGTCAGAAAGGTCCTGAGCATGCCGC | |
| | AGGTCAACATCGTCAAGAAGACAGAAGTCCAGACAGGAGGATTCAGCAAGGAAAGCATCCTGCCGAAGAGAAACAGCGACAAGCTG | |
| | ATCGCAAGAAAGAAGGACTGGGACCCGAAGAAGTACGGAGGATTCGACAGCCCGACAGTCGCATACAGCGTCCTGGTCGTCGCAAA | |
| | GGTCGAAAAGGGAAAGAGCAAGAAGCTGAAGAGCGTCAAGGAACTGCTGGGAATCACAATCATGGAAAGAAGCAGCTTCGAAAAGA | |
| | ACCCGATCGACTTCCTGGAAGCAAAGGGATACAAGGAAGTCAAGAAGGACCTGATCATCAAGCTGCCGAAGTACAGCCTGTTCGAA | |
| | CTGGAAAACGGAAGAAAGAGAATGCTGGCAAGCGCAGGAGAACTGCAGAAGGGAAACGAACTGGCACTGCCGAGCAAGTACGTCAA | |
| | CTTCCTGTACCTGGCAAGCCACTACGAAAAGCTGAAGGGAAGCCCGGAAGACAACGAACAGAAGCAGCTGTTCGTCGAACAGCACA | |
| | AGCACTACCTGGACGAAATCATCGAACAGATCAGCGAATTCAGCAAGAGAGTCATCCTGGCAGACGCAAACCTGGACAAGGTCCTG | |
| | AGCGCATACAACAAGCACAGAGACAAGCCGATCAGAGAACAGGCAGAAAACATCATCCACCTGTTCACACTGACAAACCTGGGAGC | |
| | ACCGGCAGCATTCAAGTACTTCGACACAACAATCGACAGAAAGAGATACACAAGCACAAAGGAAGTCCTGGACGCAACACTGATCC | |
| | ACCAGAGCATCACAGGACTGTACGAAACAAGAATCGACCTGAGCCAGCTGGGAGGAGACGGAGGAGGAAGCAGAGCAGCAAAGAGA | |
| | CCGAGAACAACA | |
| Open reading | GACAAGAAGTACAGCATCGGACTGGACATCGGAACAAACAGCGTCGGATGGGCAGTCATCACAGACGAATACAAGGTCCCGAGCAA | 370 |
| frame for | GAAGTTCAAGGTCCTGGGAAACACAGACAGACACAGCATCAAGAAGAACCTGATCGGAGCACTGCTGTTCGACAGCGGAGAAACAG | |
| Cas9 with | CAGAAGCAACAAGACTGAAGAGAACAGCAAGAAGAAGATACACAAGAAGAAAGAACAGAATCTGCTACCTGCAGGAAATCTTCAGC | |
| NLS6 (no | AACGAAATGGCAAAGGTCGACGACAGCTTCTTCCACAGACTGGAAGAAAGCTTCCTGGTCGAAGAAGACAAGAAGCACGAAAGACA | |
| start or | CCCGATCTTCGGAAACATCGTCGACGAAGTCGCATACCACGAAAAGTACCCGACAATCTACCACCTGAGAAAGAAGCTGGTCGACA | |
| stop codons; | GCACAGACAAGGCAGACCTGAGACTGATCTACCTGGCACTGGCACACATGATCAAGTTCAGAGGACACTTCCTGATCGAAGGAGAC | |
| suitable for | CTGAACCCGGACAACAGCGACGTCGACAAGCTGTTCATCCAGCTGGTCCAGACATACAACCAGCTGTTCGAAGAAAACCCGATCAA | |
| inclusion in | CGCAAGCGGAGTCGACGCAAAGGCAATCCTGAGCGCAAGACTGAGCAAGAGCAGAAGACTGGAAAACCTGATCGCACAGCTGCCGG | |
| fusion | GAGAAAAGAAGAACGGACTGTTCGGAAACCTGATCGCACTGAGCCTGGGACTGACACCGAACTTCAAGAGCAACTTCGACCTGGCA | |
| protein | GAAGACGCAAAGCTGCAGCTGAGCAAGGACACATACGACGACGACCTGGACAACCTGCTGGCACAGATCGGAGACCAGTACGCAGA | |
| coding | CCTGTTCCTGGCAGCAAAGAACCTGAGCGACGCAATCCTGCTGAGCGACATCCTGAGAGTCAACACAGAAATCACAAAGGCACCGC | |
| sequence) | TGAGCGCAAGCATGATCAAGAGATACGACGAACACCACCAGGACCTGACACTGCTGAAGGCACTGGTCAGACAGCAGCTGCCGGAA | |
| | AAGTACAAGGAAATCTTCTTCGACCAGAGCAAGAACGGATACGCAGGATACATCGACGGAGGAGCAAGCCAGGAAGAATTCTACAA | |
| | GTTCATCAAGCCGATCCTGGAAAAGATGGACGGAACAGAAGAACTGCTGGTCAAGCTGAACAGAGAAGACCTGCTGAGAAAGCAGA | |
| | GAACATTCGACAACGGAAGCATCCCGCACCAGATCCACCTGGGAGAACTGCACGCAATCCTGAGAAGACAGGAAGACTTCTACCCG | |
| | TTCCTGAAGGACAACAGAGAAAAGATCGAAAAGATCCTGACATTCAGAATCCCGTACTACGTCGGACCGCTGGCAAGAGGAAACAG | |
| | CAGATTCGCATGGATGACAAGAAAGAGCGAAGAAACAATCACACCGTGGAACTTCGAAGAAGTCGTCGACAAGGGAGCAAGCGCAC | |
| | AGAGCTTCATCGAAAGAATGACAAACTTCGACAAGAACCTGCCGAACGAAAAGGTCCTGCCGAAGCACAGCCTGCTGTACGAATAC | |
| | TTCACAGTCTACAACGAACTGACAAAGGTCAAGTACGTCACAGAAGGAATGAGAAAGCCGGCATTCCTGAGCGGAGAACAGAAGAA | |
| | GGCAATCGTCGACCTGCTGTTCAAGACAAACAGAAAGGTCACAGTCAAGCAGCTGAAGGAAGACTACTTCAAGAAGATCGAATGCT | |
| | TCGACAGCGTCGAAATCAGCGGAGTCGAAGACAGATTCAACGCAAGCCTGGGAACATACCACGACCTGCTGAAGATCATCAAGGAC | |
| | AAGGACTTCCTGGACAACGAAGAAAACGAAGACATCCTGGAAGACATCGTCCTGACACTGACACTGTTCGAAGACAGAGAAATGAT | |
| | CGAAGAAAGACTGAAGACATACGCACACCTGTTCGACGACAAGGTCATGAAGCAGCTGAAGAGAAGAAGATACACAGGATGGGGAA | |
| | GACTGAGCAGAAAGCTGATCAACGGAATCAGAGACAAGCAGAGCGGAAAGACAATCCTGGACTTCCTGAAGAGCGACGGATTCGCA | |
| | AACAGAAACTTCATGCAGCTGATCCACGACGACAGCCTGACATTCAAGGAAGACATCCAGAAGGCACAGGTCAGCGGACAGGGAGA | |
| | CAGCCTGCACGAACACATCGCAAACCTGGCAGGAAGCCCGGCAATCAAGAAGGGAATCCTGCAGACAGTCAAGGTCGTCGACGAAC | |
| | TGGTCAAGGTCATGGGAAGACACAAGCCGGAAAACATCGTCATCGAAATGGCAAGAGAAAACCAGACAACACAGAAGGGACAGAAG | |
| | AACAGCAGAGAAAGAATGAAGAGAATCGAAGAAGGAATCAAGGAACTGGGAAGCCAGATCCTGAAGGAACACCCGGTCGAAAACAC | |
| | ACAGCTGCAGAACGAAAAGCTGTACCTGTACTACCTGCAGAACGGAAGAGACATGTACGTCGACCAGGAACTGGACATCAACAGAC | |
| | TGAGCGACTACGACGTCGACCACATCGTCCCGCAGAGCTTCCTGAAGGACGACAGCATCGACAACAAGGTCCTGACAAGAAGCGAC | |
| | AAGAACAGAGGAAAGAGCGACAACGTCCCGAGCGAAGAAGTCGTCAAGAAGATGAAGAACTACTGGAGACAGCTGCTGAACGCAAA | |
| | GCTGATCACACAGAGAAAGTTCGACAACCTGACAAAGGCAGAGAGAGGAGGACTGAGCGAACTGGACAAGGCAGGATTCATCAAGA | |
| | GACAGCTGGTCGAAACAAGACAGATCACAAAGCACGTCGCACAGATCCTGGACAGCAGAATGAACACAAAGTACGACGAAAACGAC | |
| | AAGCTGATCAGAGAAGTCAAGGTCATCACACTGAAGAGCAAGCTGGTCAGCGACTTCAGAAAGGACTTCCAGTTCTACAAGGTCAG | |
| | AGAAATCAACAACTACCACCACGCACACGACGCATACCTGAACGCAGTCGTCGGAACAGCACTGATCAAGAAGTACCCGAAGCTGG | |
| | AAAGCGAATTCGTCTACGGAGACTACAAGGTCTACGACGTCAGAAAGATGATCGCAAAGAGCGAACAGGAAATCGGAAAGGCAACA | |
| | GCAAAGTACTTCTTCTACAGCAACATCATGAACTTCTTCAAGACAGAAATCACACTGGCAAACGGAGAAATCAGAAAGAGACCGCT | |
| | GATCGAAACAAACGGAGAAACAGGAGAAATCGTCTGGGACAAGGGAAGAGACTTCGCAACAGTCAGAAAGGTCCTGAGCATGCCGC | |
| | AGGTCAACATCGTCAAGAAGACAGAAGTCCAGACAGGAGGATTCAGCAAGGAAAGCATCCTGCCGAAGAGAAACAGCGACAAGCTG | |
| | ATCGCAAGAAAGAAGGACTGGGACCCGAAGAAGTACGGAGGATTCGACAGCCCGACAGTCGCATACAGCGTCCTGGTCGTCGCAAA | |
| | GGTCGAAAAGGGAAAGAGCAAGAAGCTGAAGAGCGTCAAGGAACTGCTGGGAATCACAATCATGGAAAGAAGCAGCTTCGAAAAGA | |
| | ACCCGATCGACTTCCTGGAAGCAAAGGGATACAAGGAAGTCAAGAAGGACCTGATCATCAAGCTGCCGAAGTACAGCCTGTTCGAA | |
| | CTGGAAAACGGAAGAAAGAGAATGCTGGCAAGCGCAGGAGAACTGCAGAAGGGAAACGAACTGGCACTGCCGAGCAAGTACGTCAA | |
| | CTTCCTGTACCTGGCAAGCCACTACGAAAAGCTGAAGGGAAGCCCGGAAGACAACGAACAGAAGCAGCTGTTCGTCGAACAGCACA | |
| | AGCACTACCTGGACGAAATCATCGAACAGATCAGCGAATTCAGCAAGAGAGTCATCCTGGCAGACGCAAACCTGGACAAGGTCCTG | |
| | AGCGCATACAACAAGCACAGAGACAAGCCGATCAGAGAACAGGCAGAAAACATCATCCACCTGTTCACACTGACAAACCTGGGAGC | |
| | ACCGGCAGCATTCAAGTACTTCGACACAACAATCGACAGAAAGAGATACACAAGCACAAAGGAAGTCCTGGACGCAACACTGATCC | |
| | ACCAGAGCATCACAGGACTGTACGAAACAAGAATCGACCTGAGCCAGCTGGGAGGAGACGGAGGAGGAAGCGCAGCAGCAAAGAGA | |
| | AGCTGGAGCATGGCAGCA | |
| Open reading | GACAAGAAGTACAGCATCGGACTGGACATCGGAACAAACAGCGTCGGATGGGCAGTCATCACAGACGAATACAAGGTCCCGAGCAA | 371 |
| frame for | GAAGTTCAAGGTCCTGGGAAACACAGACAGACACAGCATCAAGAAGAACCTGATCGGAGCACTGCTGTTCGACAGCGGAGAAACAG | |
| Cas9 with | CAGAAGCAACAAGACTGAAGAGAACAGCAAGAAGAAGATACACAAGAAGAAAGAACAGAATCTGCTACCTGCAGGAAATCTTCAGC | |
| NLS7 (no | AACGAAATGGCAAAGGTCGACGACAGCTTCTTCCACAGACTGGAAGAAAGCTTCCTGGTCGAAGAAGACAAGAAGCACGAAAGACA | |
| start or | CCCGATCTTCGGAAACATCGTCGACGAAGTCGCATACCACGAAAAGTACCCGACAATCTACCACCTGAGAAAGAAGCTGGTCGACA | |
| stop codons; | GCACAGACAAGGCAGACCTGAGACTGATCTACCTGGCACTGGCACACATGATCAAGTTCAGAGGACACTTCCTGATCGAAGGAGAC | |
| suitable for | CTGAACCCGGACAACAGCGACGTCGACAAGCTGTTCATCCAGCTGGTCCAGACATACAACCAGCTGTTCGAAGAAAACCCGATCAA | |
| inclusion in | CGCAAGCGGAGTCGACGCAAAGGCAATCCTGAGCGCAAGACTGAGCAAGAGCAGAAGACTGGAAAACCTGATCGCACAGCTGCCGG | |
| fusion | GAGAAAAGAAGAACGGACTGTTCGGAAACCTGATCGCACTGAGCCTGGGACTGACACCGAACTTCAAGAGCAACTTCGACCTGGCA | |
| protein | GAAGACGCAAAGCTGCAGCTGAGCAAGGACACATACGACGACGACCTGGACAACCTGCTGGCACAGATCGGAGACCAGTACGCAGA | |
| coding | CCTGTTCCTGGCAGCAAAGAACCTGAGCGACGCAATCCTGCTGAGCGACATCCTGAGAGTCAACACAGAAATCACAAAGGCACCGC | |
| sequence) | TGAGCGCAAGCATGATCAAGAGATACGACGAACACCACCAGGACCTGACACTGCTGAAGGCACTGGTCAGACAGCAGCTGCCGGAA | |
| | AAGTACAAGGAAATCTTCTTCGACCAGAGCAAGAACGGATACGCAGGATACATCGACGGAGGAGCAAGCCAGGAAGAATTCTACAA | |
| | GTTCATCAAGCCGATCCTGGAAAAGATGGACGGAACAGAAGAACTGCTGGTCAAGCTGAACAGAGAAGACCTGCTGAGAAAGCAGA | |
| | GAACATTCGACAACGGAAGCATCCCGCACCAGATCCACCTGGGAGAACTGCACGCAATCCTGAGAAGACAGGAAGACTTCTACCCG | |
| | TTCCTGAAGGACAACAGAGAAAAGATCGAAAAGATCCTGACATTCAGAATCCCGTACTACGTCGGACCGCTGGCAAGAGGAAACAG | |
| | CAGATTCGCATGGATGACAAGAAAGAGCGAAGAAACAATCACACCGTGGAACTTCGAAGAAGTCGTCGACAAGGGAGCAAGCGCAC | |
| | AGAGCTTCATCGAAAGAATGACAAACTTCGACAAGAACCTGCCGAACGAAAAGGTCCTGCCGAAGCACAGCCTGCTGTACGAATAC | |
| | TTCACAGTCTACAACGAACTGACAAAGGTCAAGTACGTCACAGAAGGAATGAGAAAGCCGGCATTCCTGAGCGGAGAACAGAAGAA | |
| | GGCAATCGTCGACCTGCTGTTCAAGACAAACAGAAAGGTCACAGTCAAGCAGCTGAAGGAAGACTACTTCAAGAAGATCGAATGCT | |
| | TCGACAGCGTCGAAATCAGCGGAGTCGAAGACAGATTCAACGCAAGCCTGGGAACATACCACGACCTGCTGAAGATCATCAAGGAC | |
| | AAGGACTTCCTGGACAACGAAGAAAACGAAGACATCCTGGAAGACATCGTCCTGACACTGACACTGTTCGAAGACAGAGAAATGAT | |
| | CGAAGAAAGACTGAAGACATACGCACACCTGTTCGACGACAAGGTCATGAAGCAGCTGAAGAGAAGAAGATACACAGGATGGGGAA | |
| | GACTGAGCAGAAAGCTGATCAACGGAATCAGAGACAAGCAGAGCGGAAAGACAATCCTGGACTTCCTGAAGAGCGACGGATTCGCA | |
| | AACAGAAACTTCATGCAGCTGATCCACGACGACAGCCTGACATTCAAGGAAGACATCCAGAAGGCACAGGTCAGCGGACAGGGAGA | |
| | CAGCCTGCACGAACACATCGCAAACCTGGCAGGAAGCCCGGCAATCAAGAAGGGAATCCTGCAGACAGTCAAGGTCGTCGACGAAC | |
| | TGGTCAAGGTCATGGGAAGACACAAGCCGGAAAACATCGTCATCGAAATGGCAAGAGAAAACCAGACAACACAGAAGGGACAGAAG | |
| | AACAGCAGAGAAAGAATGAAGAGAATCGAAGAAGGAATCAAGGAACTGGGAAGCCAGATCCTGAAGGAACACCCGGTCGAAAACAC | |
| | ACAGCTGCAGAACGAAAAGCTGTACCTGTACTACCTGCAGAACGGAAGAGACATGTACGTCGACCAGGAACTGGACATCAACAGAC | |
| | TGAGCGACTACGACGTCGACCACATCGTCCCGCAGAGCTTCCTGAAGGACGACAGCATCGACAACAAGGTCCTGACAAGAAGCGAC | |
| | AAGAACAGAGGAAAGAGCGACAACGTCCCGAGCGAAGAAGTCGTCAAGAAGATGAAGAACTACTGGAGACAGCTGCTGAACGCAAA | |
| | GCTGATCACACAGAGAAAGTTCGACAACCTGACAAAGGCAGAGAGAGGAGGACTGAGCGAACTGGACAAGGCAGGATTCATCAAGA | |
| | GACAGCTGGTCGAAACAAGACAGATCACAAAGCACGTCGCACAGATCCTGGACAGCAGAATGAACACAAAGTACGACGAAAACGAC | |
| | AAGCTGATCAGAGAAGTCAAGGTCATCACACTGAAGAGCAAGCTGGTCAGCGACTTCAGAAAGGACTTCCAGTTCTACAAGGTCAG | |
| | AGAAATCAACAACTACCACCACGCACACGACGCATACCTGAACGCAGTCGTCGGAACAGCACTGATCAAGAAGTACCCGAAGCTGG | |
| | AAAGCGAATTCGTCTACGGAGACTACAAGGTCTACGACGTCAGAAAGATGATCGCAAAGAGCGAACAGGAAATCGGAAAGGCAACA | |
| | GCAAAGTACTTCTTCTACAGCAACATCATGAACTTCTTCAAGACAGAAATCACACTGGCAAACGGAGAAATCAGAAAGAGACCGCT | |
| | GATCGAAACAAACGGAGAAACAGGAGAAATCGTCTGGGACAAGGGAAGAGACTTCGCAACAGTCAGAAAGGTCCTGAGCATGCCGC | |
| | AGGTCAACATCGTCAAGAAGACAGAAGTCCAGACAGGAGGATTCAGCAAGGAAAGCATCCTGCCGAAGAGAAACAGCGACAAGCTG | |
| | ATCGCAAGAAAGAAGGACTGGGACCCGAAGAAGTACGGAGGATTCGACAGCCCGACAGTCGCATACAGCGTCCTGGTCGTCGCAAA | |
| | GGTCGAAAAGGGAAAGAGCAAGAAGCTGAAGAGCGTCAAGGAACTGCTGGGAATCACAATCATGGAAAGAAGCAGCTTCGAAAAGA | |
| | ACCCGATCGACTTCCTGGAAGCAAAGGGATACAAGGAAGTCAAGAAGGACCTGATCATCAAGCTGCCGAAGTACAGCCTGTTCGAA | |
| | CTGGAAAACGGAAGAAAGAGAATGCTGGCAAGCGCAGGAGAACTGCAGAAGGGAAACGAACTGGCACTGCCGAGCAAGTACGTCAA | |
| | CTTCCTGTACCTGGCAAGCCACTACGAAAAGCTGAAGGGAAGCCCGGAAGACAACGAACAGAAGCAGCTGTTCGTCGAACAGCACA | |
| | AGCACTACCTGGACGAAATCATCGAACAGATCAGCGAATTCAGCAAGAGAGTCATCCTGGCAGACGCAAACCTGGACAAGGTCCTG | |
| | AGCGCATACAACAAGCACAGAGACAAGCCGATCAGAGAACAGGCAGAAAACATCATCCACCTGTTCACACTGACAAACCTGGGAGC | |
| | ACCGGCAGCATTCAAGTACTTCGACACAACAATCGACAGAAAGAGATACACAAGCACAAAGGAAGTCCTGGACGCAACACTGATCC | |
| | ACCAGAGCATCACAGGACTGTACGAAACAAGAATCGACCTGAGCCAGCTGGGAGGAGACGGAGGAGGAAGCGCAGCAGCAAAGAGA | |
| | GTCTGGAGCATGGCATTC | |
| Open reading | GACAAGAAGTACAGCATCGGACTGGACATCGGAACAAACAGCGTCGGATGGGCAGTCATCACAGACGAATACAAGGTCCCGAGCAA | 372 |
| frame for | GAAGTTCAAGGTCCTGGGAAACACAGACAGACACAGCATCAAGAAGAACCTGATCGGAGCACTGCTGTTCGACAGCGGAGAAACAG | |
| Cas9 with | CAGAAGCAACAAGACTGAAGAGAACAGCAAGAAGAAGATACACAAGAAGAAAGAACAGAATCTGCTACCTGCAGGAAATCTTCAGC | |
| NLS8 (no | AACGAAATGGCAAAGGTCGACGACAGCTTCTTCCACAGACTGGAAGAAAGCTTCCTGGTCGAAGAAGACAAGAAGCACGAAAGACA | |
| start or | CCCGATCTTCGGAAACATCGTCGACGAAGTCGCATACCACGAAAAGTACCCGACAATCTACCACCTGAGAAAGAAGCTGGTCGACA | |
| stop codons; | GCACAGACAAGGCAGACCTGAGACTGATCTACCTGGCACTGGCACACATGATCAAGTTCAGAGGACACTTCCTGATCGAAGGAGAC | |
| suitable for | CTGAACCCGGACAACAGCGACGTCGACAAGCTGTTCATCCAGCTGGTCCAGACATACAACCAGCTGTTCGAAGAAAACCCGATCAA | |
| inclusion in | CGCAAGCGGAGTCGACGCAAAGGCAATCCTGAGCGCAAGACTGAGCAAGAGCAGAAGACTGGAAAACCTGATCGCACAGCTGCCGG | |
| fusion | GAGAAAAGAAGAACGGACTGTTCGGAAACCTGATCGCACTGAGCCTGGGACTGACACCGAACTTCAAGAGCAACTTCGACCTGGCA | |
| protein | GAAGACGCAAAGCTGCAGCTGAGCAAGGACACATACGACGACGACCTGGACAACCTGCTGGCACAGATCGGAGACCAGTACGCAGA | |
| coding | CCTGTTCCTGGCAGCAAAGAACCTGAGCGACGCAATCCTGCTGAGCGACATCCTGAGAGTCAACACAGAAATCACAAAGGCACCGC | |
| sequence) | TGAGCGCAAGCATGATCAAGAGATACGACGAACACCACCAGGACCTGACACTGCTGAAGGCACTGGTCAGACAGCAGCTGCCGGAA | |
| | AAGTACAAGGAAATCTTCTTCGACCAGAGCAAGAACGGATACGCAGGATACATCGACGGAGGAGCAAGCCAGGAAGAATTCTACAA | |
| | GTTCATCAAGCCGATCCTGGAAAAGATGGACGGAACAGAAGAACTGCTGGTCAAGCTGAACAGAGAAGACCTGCTGAGAAAGCAGA | |
| | GAACATTCGACAACGGAAGCATCCCGCACCAGATCCACCTGGGAGAACTGCACGCAATCCTGAGAAGACAGGAAGACTTCTACCCG | |
| | TTCCTGAAGGACAACAGAGAAAAGATCGAAAAGATCCTGACATTCAGAATCCCGTACTACGTCGGACCGCTGGCAAGAGGAAACAG | |
| | CAGATTCGCATGGATGACAAGAAAGAGCGAAGAAACAATCACACCGTGGAACTTCGAAGAAGTCGTCGACAAGGGAGCAAGCGCAC | |
| | AGAGCTTCATCGAAAGAATGACAAACTTCGACAAGAACCTGCCGAACGAAAAGGTCCTGCCGAAGCACAGCCTGCTGTACGAATAC | |
| | TTCACAGTCTACAACGAACTGACAAAGGTCAAGTACGTCACAGAAGGAATGAGAAAGCCGGCATTCCTGAGCGGAGAACAGAAGAA | |
| | GGCAATCGTCGACCTGCTGTTCAAGACAAACAGAAAGGTCACAGTCAAGCAGCTGAAGGAAGACTACTTCAAGAAGATCGAATGCT | |
| | TCGACAGCGTCGAAATCAGCGGAGTCGAAGACAGATTCAACGCAAGCCTGGGAACATACCACGACCTGCTGAAGATCATCAAGGAC | |
| | AAGGACTTCCTGGACAACGAAGAAAACGAAGACATCCTGGAAGACATCGTCCTGACACTGACACTGTTCGAAGACAGAGAAATGAT | |
| | CGAAGAAAGACTGAAGACATACGCACACCTGTTCGACGACAAGGTCATGAAGCAGCTGAAGAGAAGAAGATACACAGGATGGGGAA | |
| | GACTGAGCAGAAAGCTGATCAACGGAATCAGAGACAAGCAGAGCGGAAAGACAATCCTGGACTTCCTGAAGAGCGACGGATTCGCA | |
| | AACAGAAACTTCATGCAGCTGATCCACGACGACAGCCTGACATTCAAGGAAGACATCCAGAAGGCACAGGTCAGCGGACAGGGAGA | |
| | CAGCCTGCACGAACACATCGCAAACCTGGCAGGAAGCCCGGCAATCAAGAAGGGAATCCTGCAGACAGTCAAGGTCGTCGACGAAC | |
| | TGGTCAAGGTCATGGGAAGACACAAGCCGGAAAACATCGTCATCGAAATGGCAAGAGAAAACCAGACAACACAGAAGGGACAGAAG | |
| | AACAGCAGAGAAAGAATGAAGAGAATCGAAGAAGGAATCAAGGAACTGGGAAGCCAGATCCTGAAGGAACACCCGGTCGAAAACAC | |
| | ACAGCTGCAGAACGAAAAGCTGTACCTGTACTACCTGCAGAACGGAAGAGACATGTACGTCGACCAGGAACTGGACATCAACAGAC | |
| | TGAGCGACTACGACGTCGACCACATCGTCCCGCAGAGCTTCCTGAAGGACGACAGCATCGACAACAAGGTCCTGACAAGAAGCGAC | |
| | AAGAACAGAGGAAAGAGCGACAACGTCCCGAGCGAAGAAGTCGTCAAGAAGATGAAGAACTACTGGAGACAGCTGCTGAACGCAAA | |
| | GCTGATCACACAGAGAAAGTTCGACAACCTGACAAAGGCAGAGAGAGGAGGACTGAGCGAACTGGACAAGGCAGGATTCATCAAGA | |
| | GACAGCTGGTCGAAACAAGACAGATCACAAAGCACGTCGCACAGATCCTGGACAGCAGAATGAACACAAAGTACGACGAAAACGAC | |
| | AAGCTGATCAGAGAAGTCAAGGTCATCACACTGAAGAGCAAGCTGGTCAGCGACTTCAGAAAGGACTTCCAGTTCTACAAGGTCAG | |
| | AGAAATCAACAACTACCACCACGCACACGACGCATACCTGAACGCAGTCGTCGGAACAGCACTGATCAAGAAGTACCCGAAGCTGG | |
| | AAAGCGAATTCGTCTACGGAGACTACAAGGTCTACGACGTCAGAAAGATGATCGCAAAGAGCGAACAGGAAATCGGAAAGGCAACA | |
| | GCAAAGTACTTCTTCTACAGCAACATCATGAACTTCTTCAAGACAGAAATCACACTGGCAAACGGAGAAATCAGAAAGAGACCGCT | |
| | GATCGAAACAAACGGAGAAACAGGAGAAATCGTCTGGGACAAGGGAAGAGACTTCGCAACAGTCAGAAAGGTCCTGAGCATGCCGC | |
| | AGGTCAACATCGTCAAGAAGACAGAAGTCCAGACAGGAGGATTCAGCAAGGAAAGCATCCTGCCGAAGAGAAACAGCGACAAGCTG | |
| | ATCGCAAGAAAGAAGGACTGGGACCCGAAGAAGTACGGAGGATTCGACAGCCCGACAGTCGCATACAGCGTCCTGGTCGTCGCAAA | |
| | GGTCGAAAAGGGAAAGAGCAAGAAGCTGAAGAGCGTCAAGGAACTGCTGGGAATCACAATCATGGAAAGAAGCAGCTTCGAAAAGA | |
| | ACCCGATCGACTTCCTGGAAGCAAAGGGATACAAGGAAGTCAAGAAGGACCTGATCATCAAGCTGCCGAAGTACAGCCTGTTCGAA | |
| | CTGGAAAACGGAAGAAAGAGAATGCTGGCAAGCGCAGGAGAACTGCAGAAGGGAAACGAACTGGCACTGCCGAGCAAGTACGTCAA | |
| | CTTCCTGTACCTGGCAAGCCACTACGAAAAGCTGAAGGGAAGCCCGGAAGACAACGAACAGAAGCAGCTGTTCGTCGAACAGCACA | |
| | AGCACTACCTGGACGAAATCATCGAACAGATCAGCGAATTCAGCAAGAGAGTCATCCTGGCAGACGCAAACCTGGACAAGGTCCTG | |
| | AGCGCATACAACAAGCACAGAGACAAGCCGATCAGAGAACAGGCAGAAAACATCATCCACCTGTTCACACTGACAAACCTGGGAGC | |
| | ACCGGCAGCATTCAAGTACTTCGACACAACAATCGACAGAAAGAGATACACAAGCACAAAGGAAGTCCTGGACGCAACACTGATCC | |
| | ACCAGAGCATCACAGGACTGTACGAAACAAGAATCGACCTGAGCCAGCTGGGAGGAGACGGAGGAGGAAGCGCAGCAGCAAAGAGA | |
| | AGCTGGAGCATGGCATTC | |
| Open reading | GACAAGAAGTACAGCATCGGACTGGACATCGGAACAAACAGCGTCGGATGGGCAGTCATCACAGACGAATACAAGGTCCCGAGCAA | 373 |
| frame for | GAAGTTCAAGGTCCTGGGAAACACAGACAGACACAGCATCAAGAAGAACCTGATCGGAGCACTGCTGTTCGACAGCGGAGAAACAG | |
| Cas9 with | CAGAAGCAACAAGACTGAAGAGAACAGCAAGAAGAAGATACACAAGAAGAAAGAACAGAATCTGCTACCTGCAGGAAATCTTCAGC | |
| NLS9 (no | AACGAAATGGCAAAGGTCGACGACAGCTTCTTCCACAGACTGGAAGAAAGCTTCCTGGTCGAAGAAGACAAGAAGCACGAAAGACA | |
| start or | CCCGATCTTCGGAAACATCGTCGACGAAGTCGCATACCACGAAAAGTACCCGACAATCTACCACCTGAGAAAGAAGCTGGTCGACA | |
| stop codons; | GCACAGACAAGGCAGACCTGAGACTGATCTACCTGGCACTGGCACACATGATCAAGTTCAGAGGACACTTCCTGATCGAAGGAGAC | |
| suitable for | CTGAACCCGGACAACAGCGACGTCGACAAGCTGTTCATCCAGCTGGTCCAGACATACAACCAGCTGTTCGAAGAAAACCCGATCAA | |
| inclusion in | CGCAAGCGGAGTCGACGCAAAGGCAATCCTGAGCGCAAGACTGAGCAAGAGCAGAAGACTGGAAAACCTGATCGCACAGCTGCCGG | |
| fusion | GAGAAAAGAAGAACGGACTGTTCGGAAACCTGATCGCACTGAGCCTGGGACTGACACCGAACTTCAAGAGCAACTTCGACCTGGCA | |
| protein | GAAGACGCAAAGCTGCAGCTGAGCAAGGACACATACGACGACGACCTGGACAACCTGCTGGCACAGATCGGAGACCAGTACGCAGA | |
| coding | CCTGTTCCTGGCAGCAAAGAACCTGAGCGACGCAATCCTGCTGAGCGACATCCTGAGAGTCAACACAGAAATCACAAAGGCACCGC | |
| sequence) | TGAGCGCAAGCATGATCAAGAGATACGACGAACACCACCAGGACCTGACACTGCTGAAGGCACTGGTCAGACAGCAGCTGCCGGAA | |
| | AAGTACAAGGAAATCTTCTTCGACCAGAGCAAGAACGGATACGCAGGATACATCGACGGAGGAGCAAGCCAGGAAGAATTCTACAA | |
| | GTTCATCAAGCCGATCCTGGAAAAGATGGACGGAACAGAAGAACTGCTGGTCAAGCTGAACAGAGAAGACCTGCTGAGAAAGCAGA | |
| | GAACATTCGACAACGGAAGCATCCCGCACCAGATCCACCTGGGAGAACTGCACGCAATCCTGAGAAGACAGGAAGACTTCTACCCG | |
| | TTCCTGAAGGACAACAGAGAAAAGATCGAAAAGATCCTGACATTCAGAATCCCGTACTACGTCGGACCGCTGGCAAGAGGAAACAG | |
| | CAGATTCGCATGGATGACAAGAAAGAGCGAAGAAACAATCACACCGTGGAACTTCGAAGAAGTCGTCGACAAGGGAGCAAGCGCAC | |
| | AGAGCTTCATCGAAAGAATGACAAACTTCGACAAGAACCTGCCGAACGAAAAGGTCCTGCCGAAGCACAGCCTGCTGTACGAATAC | |
| | TTCACAGTCTACAACGAACTGACAAAGGTCAAGTACGTCACAGAAGGAATGAGAAAGCCGGCATTCCTGAGCGGAGAACAGAAGAA | |
| | GGCAATCGTCGACCTGCTGTTCAAGACAAACAGAAAGGTCACAGTCAAGCAGCTGAAGGAAGACTACTTCAAGAAGATCGAATGCT | |
| | TCGACAGCGTCGAAATCAGCGGAGTCGAAGACAGATTCAACGCAAGCCTGGGAACATACCACGACCTGCTGAAGATCATCAAGGAC | |
| | AAGGACTTCCTGGACAACGAAGAAAACGAAGACATCCTGGAAGACATCGTCCTGACACTGACACTGTTCGAAGACAGAGAAATGAT | |
| | CGAAGAAAGACTGAAGACATACGCACACCTGTTCGACGACAAGGTCATGAAGCAGCTGAAGAGAAGAAGATACACAGGATGGGGAA | |
| | GACTGAGCAGAAAGCTGATCAACGGAATCAGAGACAAGCAGAGCGGAAAGACAATCCTGGACTTCCTGAAGAGCGACGGATTCGCA | |
| | AACAGAAACTTCATGCAGCTGATCCACGACGACAGCCTGACATTCAAGGAAGACATCCAGAAGGCACAGGTCAGCGGACAGGGAGA | |
| | CAGCCTGCACGAACACATCGCAAACCTGGCAGGAAGCCCGGCAATCAAGAAGGGAATCCTGCAGACAGTCAAGGTCGTCGACGAAC | |
| | TGGTCAAGGTCATGGGAAGACACAAGCCGGAAAACATCGTCATCGAAATGGCAAGAGAAAACCAGACAACACAGAAGGGACAGAAG | |
| | AACAGCAGAGAAAGAATGAAGAGAATCGAAGAAGGAATCAAGGAACTGGGAAGCCAGATCCTGAAGGAACACCCGGTCGAAAACAC | |
| | ACAGCTGCAGAACGAAAAGCTGTACCTGTACTACCTGCAGAACGGAAGAGACATGTACGTCGACCAGGAACTGGACATCAACAGAC | |
| | TGAGCGACTACGACGTCGACCACATCGTCCCGCAGAGCTTCCTGAAGGACGACAGCATCGACAACAAGGTCCTGACAAGAAGCGAC | |
| | AAGAACAGAGGAAAGAGCGACAACGTCCCGAGCGAAGAAGTCGTCAAGAAGATGAAGAACTACTGGAGACAGCTGCTGAACGCAAA | |
| | GCTGATCACACAGAGAAAGTTCGACAACCTGACAAAGGCAGAGAGAGGAGGACTGAGCGAACTGGACAAGGCAGGATTCATCAAGA | |
| | GACAGCTGGTCGAAACAAGACAGATCACAAAGCACGTCGCACAGATCCTGGACAGCAGAATGAACACAAAGTACGACGAAAACGAC | |
| | AAGCTGATCAGAGAAGTCAAGGTCATCACACTGAAGAGCAAGCTGGTCAGCGACTTCAGAAAGGACTTCCAGTTCTACAAGGTCAG | |
| | AGAAATCAACAACTACCACCACGCACACGACGCATACCTGAACGCAGTCGTCGGAACAGCACTGATCAAGAAGTACCCGAAGCTGG | |
| | AAAGCGAATTCGTCTACGGAGACTACAAGGTCTACGACGTCAGAAAGATGATCGCAAAGAGCGAACAGGAAATCGGAAAGGCAACA | |
| | GCAAAGTACTTCTTCTACAGCAACATCATGAACTTCTTCAAGACAGAAATCACACTGGCAAACGGAGAAATCAGAAAGAGACCGCT | |
| | GATCGAAACAAACGGAGAAACAGGAGAAATCGTCTGGGACAAGGGAAGAGACTTCGCAACAGTCAGAAAGGTCCTGAGCATGCCGC | |
| | AGGTCAACATCGTCAAGAAGACAGAAGTCCAGACAGGAGGATTCAGCAAGGAAAGCATCCTGCCGAAGAGAAACAGCGACAAGCTG | |
| | ATCGCAAGAAAGAAGGACTGGGACCCGAAGAAGTACGGAGGATTCGACAGCCCGACAGTCGCATACAGCGTCCTGGTCGTCGCAAA | |
| | GGTCGAAAAGGGAAAGAGCAAGAAGCTGAAGAGCGTCAAGGAACTGCTGGGAATCACAATCATGGAAAGAAGCAGCTTCGAAAAGA | |
| | ACCCGATCGACTTCCTGGAAGCAAAGGGATACAAGGAAGTCAAGAAGGACCTGATCATCAAGCTGCCGAAGTACAGCCTGTTCGAA | |
| | CTGGAAAACGGAAGAAAGAGAATGCTGGCAAGCGCAGGAGAACTGCAGAAGGGAAACGAACTGGCACTGCCGAGCAAGTACGTCAA | |
| | CTTCCTGTACCTGGCAAGCCACTACGAAAAGCTGAAGGGAAGCCCGGAAGACAACGAACAGAAGCAGCTGTTCGTCGAACAGCACA | |
| | AGCACTACCTGGACGAAATCATCGAACAGATCAGCGAATTCAGCAAGAGAGTCATCCTGGCAGACGCAAACCTGGACAAGGTCCTG | |
| | AGCGCATACAACAAGCACAGAGACAAGCCGATCAGAGAACAGGCAGAAAACATCATCCACCTGTTCACACTGACAAACCTGGGAGC | |
| | ACCGGCAGCATTCAAGTACTTCGACACAACAATCGACAGAAAGAGATACACAAGCACAAAGGAAGTCCTGGACGCAACACTGATCC | |
| | ACCAGAGCATCACAGGACTGTACGAAACAAGAATCGACCTGAGCCAGCTGGGAGGAGACGGAGGAGGAAGCGCAGCAGCAAAGAGA | |
| | AAGTACTTCGCAGCA | |
| Open reading | GACAAGAAGTACAGCATCGGACTGGACATCGGAACAAACAGCGTCGGATGGGCAGTCATCACAGACGAATACAAGGTCCCGAGCAA | 374 |
| frame for | GAAGTTCAAGGTCCTGGGAAACACAGACAGACACAGCATCAAGAAGAACCTGATCGGAGCACTGCTGTTCGACAGCGGAGAAACAG | |
| Cas9 with | CAGAAGCAACAAGACTGAAGAGAACAGCAAGAAGAAGATACACAAGAAGAAAGAACAGAATCTGCTACCTGCAGGAAATCTTCAGC | |
| NLS10 (no | AACGAAATGGCAAAGGTCGACGACAGCTTCTTCCACAGACTGGAAGAAAGCTTCCTGGTCGAAGAAGACAAGAAGCACGAAAGACA | |
| start or | CCCGATCTTCGGAAACATCGTCGACGAAGTCGCATACCACGAAAAGTACCCGACAATCTACCACCTGAGAAAGAAGCTGGTCGACA | |
| stop codons; | GCACAGACAAGGCAGACCTGAGACTGATCTACCTGGCACTGGCACACATGATCAAGTTCAGAGGACACTTCCTGATCGAAGGAGAC | |
| suitable for | CTGAACCCGGACAACAGCGACGTCGACAAGCTGTTCATCCAGCTGGTCCAGACATACAACCAGCTGTTCGAAGAAAACCCGATCAA | |
| inclusion in | CGCAAGCGGAGTCGACGCAAAGGCAATCCTGAGCGCAAGACTGAGCAAGAGCAGAAGACTGGAAAACCTGATCGCACAGCTGCCGG | |
| fusion | GAGAAAAGAAGAACGGACTGTTCGGAAACCTGATCGCACTGAGCCTGGGACTGACACCGAACTTCAAGAGCAACTTCGACCTGGCA | |
| protein | GAAGACGCAAAGCTGCAGCTGAGCAAGGACACATACGACGACGACCTGGACAACCTGCTGGCACAGATCGGAGACCAGTACGCAGA | |
| coding | CCTGTTCCTGGCAGCAAAGAACCTGAGCGACGCAATCCTGCTGAGCGACATCCTGAGAGTCAACACAGAAATCACAAAGGCACCGC | |
| sequence) | TGAGCGCAAGCATGATCAAGAGATACGACGAACACCACCAGGACCTGACACTGCTGAAGGCACTGGTCAGACAGCAGCTGCCGGAA | |
| | AAGTACAAGGAAATCTTCTTCGACCAGAGCAAGAACGGATACGCAGGATACATCGACGGAGGAGCAAGCCAGGAAGAATTCTACAA | |
| | GTTCATCAAGCCGATCCTGGAAAAGATGGACGGAACAGAAGAACTGCTGGTCAAGCTGAACAGAGAAGACCTGCTGAGAAAGCAGA | |
| | GAACATTCGACAACGGAAGCATCCCGCACCAGATCCACCTGGGAGAACTGCACGCAATCCTGAGAAGACAGGAAGACTTCTACCCG | |
| | TTCCTGAAGGACAACAGAGAAAAGATCGAAAAGATCCTGACATTCAGAATCCCGTACTACGTCGGACCGCTGGCAAGAGGAAACAG | |
| | CAGATTCGCATGGATGACAAGAAAGAGCGAAGAAACAATCACACCGTGGAACTTCGAAGAAGTCGTCGACAAGGGAGCAAGCGCAC | |
| | AGAGCTTCATCGAAAGAATGACAAACTTCGACAAGAACCTGCCGAACGAAAAGGTCCTGCCGAAGCACAGCCTGCTGTACGAATAC | |
| | TTCACAGTCTACAACGAACTGACAAAGGTCAAGTACGTCACAGAAGGAATGAGAAAGCCGGCATTCCTGAGCGGAGAACAGAAGAA | |
| | GGCAATCGTCGACCTGCTGTTCAAGACAAACAGAAAGGTCACAGTCAAGCAGCTGAAGGAAGACTACTTCAAGAAGATCGAATGCT | |
| | TCGACAGCGTCGAAATCAGCGGAGTCGAAGACAGATTCAACGCAAGCCTGGGAACATACCACGACCTGCTGAAGATCATCAAGGAC | |
| | AAGGACTTCCTGGACAACGAAGAAAACGAAGACATCCTGGAAGACATCGTCCTGACACTGACACTGTTCGAAGACAGAGAAATGAT | |
| | CGAAGAAAGACTGAAGACATACGCACACCTGTTCGACGACAAGGTCATGAAGCAGCTGAAGAGAAGAAGATACACAGGATGGGGAA | |
| | GACTGAGCAGAAAGCTGATCAACGGAATCAGAGACAAGCAGAGCGGAAAGACAATCCTGGACTTCCTGAAGAGCGACGGATTCGCA | |
| | AACAGAAACTTCATGCAGCTGATCCACGACGACAGCCTGACATTCAAGGAAGACATCCAGAAGGCACAGGTCAGCGGACAGGGAGA | |
| | CAGCCTGCACGAACACATCGCAAACCTGGCAGGAAGCCCGGCAATCAAGAAGGGAATCCTGCAGACAGTCAAGGTCGTCGACGAAC | |
| | TGGTCAAGGTCATGGGAAGACACAAGCCGGAAAACATCGTCATCGAAATGGCAAGAGAAAACCAGACAACACAGAAGGGACAGAAG | |
| | AACAGCAGAGAAAGAATGAAGAGAATCGAAGAAGGAATCAAGGAACTGGGAAGCCAGATCCTGAAGGAACACCCGGTCGAAAACAC | |
| | ACAGCTGCAGAACGAAAAGCTGTACCTGTACTACCTGCAGAACGGAAGAGACATGTACGTCGACCAGGAACTGGACATCAACAGAC | |
| | TGAGCGACTACGACGTCGACCACATCGTCCCGCAGAGCTTCCTGAAGGACGACAGCATCGACAACAAGGTCCTGACAAGAAGCGAC | |
| | AAGAACAGAGGAAAGAGCGACAACGTCCCGAGCGAAGAAGTCGTCAAGAAGATGAAGAACTACTGGAGACAGCTGCTGAACGCAAA | |
| | GCTGATCACACAGAGAAAGTTCGACAACCTGACAAAGGCAGAGAGAGGAGGACTGAGCGAACTGGACAAGGCAGGATTCATCAAGA | |
| | GACAGCTGGTCGAAACAAGACAGATCACAAAGCACGTCGCACAGATCCTGGACAGCAGAATGAACACAAAGTACGACGAAAACGAC | |
| | AAGCTGATCAGAGAAGTCAAGGTCATCACACTGAAGAGCAAGCTGGTCAGCGACTTCAGAAAGGACTTCCAGTTCTACAAGGTCAG | |
| | AGAAATCAACAACTACCACCACGCACACGACGCATACCTGAACGCAGTCGTCGGAACAGCACTGATCAAGAAGTACCCGAAGCTGG | |
| | AAAGCGAATTCGTCTACGGAGACTACAAGGTCTACGACGTCAGAAAGATGATCGCAAAGAGCGAACAGGAAATCGGAAAGGCAACA | |
| | GCAAAGTACTTCTTCTACAGCAACATCATGAACTTCTTCAAGACAGAAATCACACTGGCAAACGGAGAAATCAGAAAGAGACCGCT | |
| | GATCGAAACAAACGGAGAAACAGGAGAAATCGTCTGGGACAAGGGAAGAGACTTCGCAACAGTCAGAAAGGTCCTGAGCATGCCGC | |
| | AGGTCAACATCGTCAAGAAGACAGAAGTCCAGACAGGAGGATTCAGCAAGGAAAGCATCCTGCCGAAGAGAAACAGCGACAAGCTG | |
| | ATCGCAAGAAAGAAGGACTGGGACCCGAAGAAGTACGGAGGATTCGACAGCCCGACAGTCGCATACAGCGTCCTGGTCGTCGCAAA | |
| | GGTCGAAAAGGGAAAGAGCAAGAAGCTGAAGAGCGTCAAGGAACTGCTGGGAATCACAATCATGGAAAGAAGCAGCTTCGAAAAGA | |
| | ACCCGATCGACTTCCTGGAAGCAAAGGGATACAAGGAAGTCAAGAAGGACCTGATCATCAAGCTGCCGAAGTACAGCCTGTTCGAA | |
| | CTGGAAAACGGAAGAAAGAGAATGCTGGCAAGCGCAGGAGAACTGCAGAAGGGAAACGAACTGGCACTGCCGAGCAAGTACGTCAA | |
| | CTTCCTGTACCTGGCAAGCCACTACGAAAAGCTGAAGGGAAGCCCGGAAGACAACGAACAGAAGCAGCTGTTCGTCGAACAGCACA | |
| | AGCACTACCTGGACGAAATCATCGAACAGATCAGCGAATTCAGCAAGAGAGTCATCCTGGCAGACGCAAACCTGGACAAGGTCCTG | |
| | AGCGCATACAACAAGCACAGAGACAAGCCGATCAGAGAACAGGCAGAAAACATCATCCACCTGTTCACACTGACAAACCTGGGAGC | |
| | ACCGGCAGCATTCAAGTACTTCGACACAACAATCGACAGAAAGAGATACACAAGCACAAAGGAAGTCCTGGACGCAACACTGATCC | |
| | ACCAGAGCATCACAGGACTGTACGAAACAAGAATCGACCTGAGCCAGCTGGGAGGAGACGGAGGAGGAAGCAGAGCAGCAAAGAGA | |
| | AAGGCATTCGCAGCA | |
| Open reading | GACAAGAAGTACAGCATCGGACTGGACATCGGAACAAACAGCGTCGGATGGGCAGTCATCACAGACGAATACAAGGTCCCGAGCAA | 375 |
| frame for | GAAGTTCAAGGTCCTGGGAAACACAGACAGACACAGCATCAAGAAGAACCTGATCGGAGCACTGCTGTTCGACAGCGGAGAAACAG | |
| Cas9 with | CAGAAGCAACAAGACTGAAGAGAACAGCAAGAAGAAGATACACAAGAAGAAAGAACAGAATCTGCTACCTGCAGGAAATCTTCAGC | |
| NLS11 (no | AACGAAATGGCAAAGGTCGACGACAGCTTCTTCCACAGACTGGAAGAAAGCTTCCTGGTCGAAGAAGACAAGAAGCACGAAAGACA | |
| start or | CCCGATCTTCGGAAACATCGTCGACGAAGTCGCATACCACGAAAAGTACCCGACAATCTACCACCTGAGAAAGAAGCTGGTCGACA | |
| stop codons; | GCACAGACAAGGCAGACCTGAGACTGATCTACCTGGCACTGGCACACATGATCAAGTTCAGAGGACACTTCCTGATCGAAGGAGAC | |
| suitable for | CTGAACCCGGACAACAGCGACGTCGACAAGCTGTTCATCCAGCTGGTCCAGACATACAACCAGCTGTTCGAAGAAAACCCGATCAA | |
| inclusion in | CGCAAGCGGAGTCGACGCAAAGGCAATCCTGAGCGCAAGACTGAGCAAGAGCAGAAGACTGGAAAACCTGATCGCACAGCTGCCGG | |
| fusion | GAGAAAAGAAGAACGGACTGTTCGGAAACCTGATCGCACTGAGCCTGGGACTGACACCGAACTTCAAGAGCAACTTCGACCTGGCA | |
| protein | GAAGACGCAAAGCTGCAGCTGAGCAAGGACACATACGACGACGACCTGGACAACCTGCTGGCACAGATCGGAGACCAGTACGCAGA | |
| coding | CCTGTTCCTGGCAGCAAAGAACCTGAGCGACGCAATCCTGCTGAGCGACATCCTGAGAGTCAACACAGAAATCACAAAGGCACCGC | |
| sequence) | TGAGCGCAAGCATGATCAAGAGATACGACGAACACCACCAGGACCTGACACTGCTGAAGGCACTGGTCAGACAGCAGCTGCCGGAA | |
| | AAGTACAAGGAAATCTTCTTCGACCAGAGCAAGAACGGATACGCAGGATACATCGACGGAGGAGCAAGCCAGGAAGAATTCTACAA | |
| | GTTCATCAAGCCGATCCTGGAAAAGATGGACGGAACAGAAGAACTGCTGGTCAAGCTGAACAGAGAAGACCTGCTGAGAAAGCAGA | |
| | GAACATTCGACAACGGAAGCATCCCGCACCAGATCCACCTGGGAGAACTGCACGCAATCCTGAGAAGACAGGAAGACTTCTACCCG | |
| | TTCCTGAAGGACAACAGAGAAAAGATCGAAAAGATCCTGACATTCAGAATCCCGTACTACGTCGGACCGCTGGCAAGAGGAAACAG | |
| | CAGATTCGCATGGATGACAAGAAAGAGCGAAGAAACAATCACACCGTGGAACTTCGAAGAAGTCGTCGACAAGGGAGCAAGCGCAC | |
| | AGAGCTTCATCGAAAGAATGACAAACTTCGACAAGAACCTGCCGAACGAAAAGGTCCTGCCGAAGCACAGCCTGCTGTACGAATAC | |
| | TTCACAGTCTACAACGAACTGACAAAGGTCAAGTACGTCACAGAAGGAATGAGAAAGCCGGCATTCCTGAGCGGAGAACAGAAGAA | |
| | GGCAATCGTCGACCTGCTGTTCAAGACAAACAGAAAGGTCACAGTCAAGCAGCTGAAGGAAGACTACTTCAAGAAGATCGAATGCT | |
| | TCGACAGCGTCGAAATCAGCGGAGTCGAAGACAGATTCAACGCAAGCCTGGGAACATACCACGACCTGCTGAAGATCATCAAGGAC | |
| | AAGGACTTCCTGGACAACGAAGAAAACGAAGACATCCTGGAAGACATCGTCCTGACACTGACACTGTTCGAAGACAGAGAAATGAT | |
| | CGAAGAAAGACTGAAGACATACGCACACCTGTTCGACGACAAGGTCATGAAGCAGCTGAAGAGAAGAAGATACACAGGATGGGGAA | |
| | GACTGAGCAGAAAGCTGATCAACGGAATCAGAGACAAGCAGAGCGGAAAGACAATCCTGGACTTCCTGAAGAGCGACGGATTCGCA | |
| | AACAGAAACTTCATGCAGCTGATCCACGACGACAGCCTGACATTCAAGGAAGACATCCAGAAGGCACAGGTCAGCGGACAGGGAGA | |
| | CAGCCTGCACGAACACATCGCAAACCTGGCAGGAAGCCCGGCAATCAAGAAGGGAATCCTGCAGACAGTCAAGGTCGTCGACGAAC | |
| | TGGTCAAGGTCATGGGAAGACACAAGCCGGAAAACATCGTCATCGAAATGGCAAGAGAAAACCAGACAACACAGAAGGGACAGAAG | |
| | AACAGCAGAGAAAGAATGAAGAGAATCGAAGAAGGAATCAAGGAACTGGGAAGCCAGATCCTGAAGGAACACCCGGTCGAAAACAC | |
| | ACAGCTGCAGAACGAAAAGCTGTACCTGTACTACCTGCAGAACGGAAGAGACATGTACGTCGACCAGGAACTGGACATCAACAGAC | |
| | TGAGCGACTACGACGTCGACCACATCGTCCCGCAGAGCTTCCTGAAGGACGACAGCATCGACAACAAGGTCCTGACAAGAAGCGAC | |
| | AAGAACAGAGGAAAGAGCGACAACGTCCCGAGCGAAGAAGTCGTCAAGAAGATGAAGAACTACTGGAGACAGCTGCTGAACGCAAA | |
| | GCTGATCACACAGAGAAAGTTCGACAACCTGACAAAGGCAGAGAGAGGAGGACTGAGCGAACTGGACAAGGCAGGATTCATCAAGA | |
| | GACAGCTGGTCGAAACAAGACAGATCACAAAGCACGTCGCACAGATCCTGGACAGCAGAATGAACACAAAGTACGACGAAAACGAC | |
| | AAGCTGATCAGAGAAGTCAAGGTCATCACACTGAAGAGCAAGCTGGTCAGCGACTTCAGAAAGGACTTCCAGTTCTACAAGGTCAG | |
| | AGAAATCAACAACTACCACCACGCACACGACGCATACCTGAACGCAGTCGTCGGAACAGCACTGATCAAGAAGTACCCGAAGCTGG | |
| | AAAGCGAATTCGTCTACGGAGACTACAAGGTCTACGACGTCAGAAAGATGATCGCAAAGAGCGAACAGGAAATCGGAAAGGCAACA | |
| | GCAAAGTACTTCTTCTACAGCAACATCATGAACTTCTTCAAGACAGAAATCACACTGGCAAACGGAGAAATCAGAAAGAGACCGCT | |
| | GATCGAAACAAACGGAGAAACAGGAGAAATCGTCTGGGACAAGGGAAGAGACTTCGCAACAGTCAGAAAGGTCCTGAGCATGCCGC | |
| | AGGTCAACATCGTCAAGAAGACAGAAGTCCAGACAGGAGGATTCAGCAAGGAAAGCATCCTGCCGAAGAGAAACAGCGACAAGCTG | |
| | ATCGCAAGAAAGAAGGACTGGGACCCGAAGAAGTACGGAGGATTCGACAGCCCGACAGTCGCATACAGCGTCCTGGTCGTCGCAAA | |
| | GGTCGAAAAGGGAAAGAGCAAGAAGCTGAAGAGCGTCAAGGAACTGCTGGGAATCACAATCATGGAAAGAAGCAGCTTCGAAAAGA | |
| | ACCCGATCGACTTCCTGGAAGCAAAGGGATACAAGGAAGTCAAGAAGGACCTGATCATCAAGCTGCCGAAGTACAGCCTGTTCGAA | |
| | CTGGAAAACGGAAGAAAGAGAATGCTGGCAAGCGCAGGAGAACTGCAGAAGGGAAACGAACTGGCACTGCCGAGCAAGTACGTCAA | |
| | CTTCCTGTACCTGGCAAGCCACTACGAAAAGCTGAAGGGAAGCCCGGAAGACAACGAACAGAAGCAGCTGTTCGTCGAACAGCACA | |
| | AGCACTACCTGGACGAAATCATCGAACAGATCAGCGAATTCAGCAAGAGAGTCATCCTGGCAGACGCAAACCTGGACAAGGTCCTG | |
| | AGCGCATACAACAAGCACAGAGACAAGCCGATCAGAGAACAGGCAGAAAACATCATCCACCTGTTCACACTGACAAACCTGGGAGC | |
| | ACCGGCAGCATTCAAGTACTTCGACACAACAATCGACAGAAAGAGATACACAAGCACAAAGGAAGTCCTGGACGCAACACTGATCC | |
| | ACCAGAGCATCACAGGACTGTACGAAACAAGAATCGACCTGAGCCAGCTGGGAGGAGACGGAGGAGGAAGCAGAGCAGCAAAGAGA | |
| | AAGTACTTCGCAGTC | |
| mRNA | GGGAAGCUCAGAAUAAACGCUCAACUUUGGCCGGAUCUGCCACCAUGGACAAGAAGUACAGCAUCGGCCUGGACAUCGGCACCAAC | 376 |
| transcript | AGCGUGGGCUGGGCCGUGAUCACCGACGAGUACAAGGUGCCCAGCAAGAAGUUCAAGGUGCUGGGCAACACCGACAGACACAGCAU | |
| with XBG | CAAGAAGAACCUGAUCGGCGCCCUGCUGUUCGACAGCGGCGAGACCGCCGAGGCCACCAGACUGAAGAGAACCGCCAGAAGAAGAU | |
| UTRs and | ACACCAGAAGAAAGAACAGAAUCUGCUACCUGCAGGAGAUCUUCAGCAACGAGAUGGCCAAGGUGGACGACAGCUUCUUCCACAGA | |
| Cas9 ORF | CUGGAGGAGAGCUUCCUGGUGGAGGAGGACAAGAAGCACGAGAGACACCCCAUCUUCGGCAACAUCGUGGACGAGGUGGCCUACCA | |
| with low U 1 | CGAGAAGUACCCCACCAUCUACCACCUGAGAAAGAAGCUGGUGGACAGCACCGACAAGGCCGACCUGAGACUGAUCUACCUGGCCC | |
| codons of | UGGCCCACAUGAUCAAGUUCAGAGGCCACUUCCUGAUCGAGGGCGACCUGAACCCCGACAACAGCGACGUGGACAAGCUGUUCAUC | |
| Table 4 | CAGCUGGUGCAGACCUACAACCAGCUGUUCGAGGAGAACCCCAUCAACGCCAGCGGCGUGGACGCCAAGGCCAUCCUGAGCGCCAG | |
| | ACUGAGCAAGAGCAGAAGACUGGAGAACCUGAUCGCCCAGCUGCCCGGCGAGAAGAAGAACGGCCUGUUCGGCAACCUGAUCGCCC | |
| | UGAGCCUGGGCCUGACCCCCAACUUCAAGAGCAACUUCGACCUGGCCGAGGACGCCAAGCUGCAGCUGAGCAAGGACACCUACGAC | |
| | GACGACCUGGACAACCUGCUGGCCCAGAUCGGCGACCAGUACGCCGACCUGUUCCUGGCCGCCAAGAACCUGAGCGACGCCAUCCU | |
| | GCUGAGCGACAUCCUGAGAGUGAACACCGAGAUCACCAAGGCCCCCCUGAGCGCCAGCAUGAUCAAGAGAUACGACGAGCACCACC | |
| | AGGACCUGACCCUGCUGAAGGCCCUGGUGAGACAGCAGCUGCCCGAGAAGUACAAGGAGAUCUUCUUCGACCAGAGCAAGAACGGC | |
| | UACGCCGGCUACAUCGACGGCGGCGCCAGCCAGGAGGAGUUCUACAAGUUCAUCAAGCCCAUCCUGGAGAAGAUGGACGGCACCGA | |
| | GGAGCUGCUGGUGAAGCUGAACAGAGAGGACCUGCUGAGAAAGCAGAGAACCUUCGACAACGGCAGCAUCCCCCACCAGAUCCACC | |
| | UGGGCGAGCUGCACGCCAUCCUGAGAAGACAGGAGGACUUCUACCCCUUCCUGAAGGACAACAGAGAGAAGAUCGAGAAGAUCCUG | |
| | ACCUUCAGAAUCCCCUACUACGUGGGCCCCCUGGCCAGAGGCAACAGCAGAUUCGCCUGGAUGACCAGAAAGAGCGAGGAGACCAU | |
| | CACCCCCUGGAACUUCGAGGAGGUGGUGGACAAGGGCGCCAGCGCCCAGAGCUUCAUCGAGAGAAUGACCAACUUCGACAAGAACC | |
| | UGCCCAACGAGAAGGUGCUGCCCAAGCACAGCCUGCUGUACGAGUACUUCACCGUGUACAACGAGCUGACCAAGGUGAAGUACGUG | |
| | ACCGAGGGCAUGAGAAAGCCCGCCUUCCUGAGCGGCGAGCAGAAGAAGGCCAUCGUGGACCUGCUGUUCAAGACCAACAGAAAGGU | |
| | GACCGUGAAGCAGCUGAAGGAGGACUACUUCAAGAAGAUCGAGUGCUUCGACAGCGUGGAGAUCAGCGGCGUGGAGGACAGAUUCA | |
| | ACGCCAGCCUGGGCACCUACCACGACCUGCUGAAGAUCAUCAAGGACAAGGACUUCCUGGACAACGAGGAGAACGAGGACAUCCUG | |
| | GAGGACAUCGUGCUGACCCUGACCCUGUUCGAGGACAGAGAGAUGAUCGAGGAGAGACUGAAGACCUACGCCCACCUGUUCGACGA | |
| | CAAGGUGAUGAAGCAGCUGAAGAGAAGAAGAUACACCGGCUGGGGCAGACUGAGCAGAAAGCUGAUCAACGGCAUCAGAGACAAGC | |
| | AGAGCGGCAAGACCAUCCUGGACUUCCUGAAGAGCGACGGCUUCGCCAACAGAAACUUCAUGCAGCUGAUCCACGACGACAGCCUG | |
| | ACCUUCAAGGAGGACAUCCAGAAGGCCCAGGUGAGCGGCCAGGGCGACAGCCUGCACGAGCACAUCGCCAACCUGGCCGGCAGCCC | |
| | CGCCAUCAAGAAGGGCAUCCUGCAGACCGUGAAGGUGGUGGACGAGCUGGUGAAGGUGAUGGGCAGACACAAGCCCGAGAACAUCG | |
| | UGAUCGAGAUGGCCAGAGAGAACCAGACCACCCAGAAGGGCCAGAAGAACAGCAGAGAGAGAAUGAAGAGAAUCGAGGAGGGCAUC | |
| | AAGGAGCUGGGCAGCCAGAUCCUGAAGGAGCACCCCGUGGAGAACACCCAGCUGCAGAACGAGAAGCUGUACCUGUACUACCUGCA | |
| | GAACGGCAGAGACAUGUACGUGGACCAGGAGCUGGACAUCAACAGACUGAGCGACUACGACGUGGACCACAUCGUGCCCCAGAGCU | |
| | UCCUGAAGGACGACAGCAUCGACAACAAGGUGCUGACCAGAAGCGACAAGAACAGAGGCAAGAGCGACAACGUGCCCAGCGAGGAG | |
| | GUGGUGAAGAAGAUGAAGAACUACUGGAGACAGCUGCUGAACGCCAAGCUGAUCACCCAGAGAAAGUUCGACAACCUGACCAAGGC | |
| | CGAGAGAGGCGGCCUGAGCGAGCUGGACAAGGCCGGCUUCAUCAAGAGACAGCUGGUGGAGACCAGACAGAUCACCAAGCACGUGG | |
| | CCCAGAUCCUGGACAGCAGAAUGAACACCAAGUACGACGAGAACGACAAGCUGAUCAGAGAGGUGAAGGUGAUCACCCUGAAGAGC | |
| | AAGCUGGUGAGCGACUUCAGAAAGGACUUCCAGUUCUACAAGGUGAGAGAGAUCAACAACUACCACCACGCCCACGACGCCUACCU | |
| | GAACGCCGUGGUGGGCACCGCCCUGAUCAAGAAGUACCCCAAGCUGGAGAGCGAGUUCGUGUACGGCGACUACAAGGUGUACGACG | |
| | UGAGAAAGAUGAUCGCCAAGAGCGAGCAGGAGAUCGGCAAGGCCACCGCCAAGUACUUCUUCUACAGCAACAUCAUGAACUUCUUC | |
| | AAGACCGAGAUCACCCUGGCCAACGGCGAGAUCAGAAAGAGACCCCUGAUCGAGACCAACGGCGAGACCGGCGAGAUCGUGUGGGA | |
| | CAAGGGCAGAGACUUCGCCACCGUGAGAAAGGUGCUGAGCAUGCCCCAGGUGAACAUCGUGAAGAAGACCGAGGUGCAGACCGGCG | |
| | GCUUCAGCAAGGAGAGCAUCCUGCCCAAGAGAAACAGCGACAAGCUGAUCGCCAGAAAGAAGGACUGGGACCCCAAGAAGUACGGC | |
| | GGCUUCGACAGCCCCACCGUGGCCUACAGCGUGCUGGUGGUGGCCAAGGUGGAGAAGGGCAAGAGCAAGAAGCUGAAGAGCGUGAA | |
| | GGAGCUGCUGGGCAUCACCAUCAUGGAGAGAAGCAGCUUCGAGAAGAACCCCAUCGACUUCCUGGAGGCCAAGGGCUACAAGGAGG | |
| | UGAAGAAGGACCUGAUCAUCAAGCUGCCCAAGUACAGCCUGUUCGAGCUGGAGAACGGCAGAAAGAGAAUGCUGGCCAGCGCCGGC | |
| | GAGCUGCAGAAGGGCAACGAGCUGGCCCUGCCCAGCAAGUACGUGAACUUCCUGUACCUGGCCAGCCACUACGAGAAGCUGAAGGG | |
| | CAGCCCCGAGGACAACGAGCAGAAGCAGCUGUUCGUGGAGCAGCACAAGCACUACCUGGACGAGAUCAUCGAGCAGAUCAGCGAGU | |
| | UCAGCAAGAGAGUGAUCCUGGCCGACGCCAACCUGGACAAGGUGCUGAGCGCCUACAACAAGCACAGAGACAAGCCCAUCAGAGAG | |
| | CAGGCCGAGAACAUCAUCCACCUGUUCACCCUGACCAACCUGGGCGCCCCCGCCGCCUUCAAGUACUUCGACACCACCAUCGACAG | |
| | AAAGAGAUACACCAGCACCAAGGAGGUGCUGGACGCCACCCUGAUCCACCAGAGCAUCACCGGCCUGUACGAGACCAGAAUCGACC | |
| | UGAGCCAGCUGGGCGGCGACGGCGGCGGCAGCCCCAAGAAGAAGAGAAAGGUGUGACUAGCACCAGCCUCAAGAACACCCGAAUGG | |
| | AGUCUCUAAGCUACAUAAUACCAACUUACACUUUACAAAAUGUUGUCCCCCAAAAUGUAGCCAUUCGUAUCUGCUCCUAAUAAAAA | |
| | GAAAGUUUCUUCACAUUCUCUCGAG | |
| mRNA | GGGAAGCUCAGAAUAAACGCUCAACUUUGGCCGGAUCUGCCACCAUGGACAAGAAGUACUCCAUCGGCCUGGACAUCGGCACCAAC | 377 |
| transcript | UCCGUGGGCUGGGCCGUGAUCACCGACGAGUACAAGGUGCCCUCCAAGAAGUUCAAGGUGCUGGGCAACACCGACCGGCACUCCAU | |
| with XBG | CAAGAAGAACCUGAUCGGCGCCCUGCUGUUCGACUCCGGCGAGACCGCCGAGGCCACCCGGCUGAAGCGGACCGCCCGGCGGCGGU | |
| UTRs and | ACACCCGGCGGAAGAACCGGAUCUGCUACCUGCAGGAGAUCUUCUCCAACGAGAUGGCCAAGGUGGACGACUCCUUCUUCCACCGG | |
| Cas9 ORF | CUGGAGGAGUCCUUCCUGGUGGAGGAGGACAAGAAGCACGAGCGGCACCCCAUCUUCGGCAACAUCGUGGACGAGGUGGCCUACCA | |
| with low A | CGAGAAGUACCCCACCAUCUACCACCUGCGGAAGAAGCUGGUGGACUCCACCGACAAGGCCGACCUGCGGCUGAUCUACCUGGCCC | |
| codons of | UGGCCCACAUGAUCAAGUUCCGGGGCCACUUCCUGAUCGAGGGCGACCUGAACCCCGACAACUCCGACGUGGACAAGCUGUUCAUC | |
| Table 4 | CAGCUGGUGCAGACCUACAACCAGCUGUUCGAGGAGAACCCCAUCAACGCCUCCGGCGUGGACGCCAAGGCCAUCCUGUCCGCCCG | |
| | GCUGUCCAAGUCCCGGCGGCUGGAGAACCUGAUCGCCCAGCUGCCCGGCGAGAAGAAGAACGGCCUGUUCGGCAACCUGAUCGCCC | |
| | UGUCCCUGGGCCUGACCCCCAACUUCAAGUCCAACUUCGACCUGGCCGAGGACGCCAAGCUGCAGCUGUCCAAGGACACCUACGAC | |
| | GACGACCUGGACAACCUGCUGGCCCAGAUCGGCGACCAGUACGCCGACCUGUUCCUGGCCGCCAAGAACCUGUCCGACGCCAUCCU | |
| | GCUGUCCGACAUCCUGCGGGUGAACACCGAGAUCACCAAGGCCCCCCUGUCCGCCUCCAUGAUCAAGCGGUACGACGAGCACCACC | |
| | AGGACCUGACCCUGCUGAAGGCCCUGGUGCGGCAGCAGCUGCCCGAGAAGUACAAGGAGAUCUUCUUCGACCAGUCCAAGAACGGC | |
| | UACGCCGGCUACAUCGACGGCGGCGCCUCCCAGGAGGAGUUCUACAAGUUCAUCAAGCCCAUCCUGGAGAAGAUGGACGGCACCGA | |
| | GGAGCUGCUGGUGAAGCUGAACCGGGAGGACCUGCUGCGGAAGCAGCGGACCUUCGACAACGGCUCCAUCCCCCACCAGAUCCACC | |
| | UGGGCGAGCUGCACGCCAUCCUGCGGCGGCAGGAGGACUUCUACCCCUUCCUGAAGGACAACCGGGAGAAGAUCGAGAAGAUCCUG | |
| | ACCUUCCGGAUCCCCUACUACGUGGGCCCCCUGGCCCGGGGCAACUCCCGGUUCGCCUGGAUGACCCGGAAGUCCGAGGAGACCAU | |
| | CACCCCCUGGAACUUCGAGGAGGUGGUGGACAAGGGCGCCUCCGCCCAGUCCUUCAUCGAGCGGAUGACCAACUUCGACAAGAACC | |
| | UGCCCAACGAGAAGGUGCUGCCCAAGCACUCCCUGCUGUACGAGUACUUCACCGUGUACAACGAGCUGACCAAGGUGAAGUACGUG | |
| | ACCGAGGGCAUGCGGAAGCCCGCCUUCCUGUCCGGCGAGCAGAAGAAGGCCAUCGUGGACCUGCUGUUCAAGACCAACCGGAAGGU | |
| | GACCGUGAAGCAGCUGAAGGAGGACUACUUCAAGAAGAUCGAGUGCUUCGACUCCGUGGAGAUCUCCGGCGUGGAGGACCGGUUCA | |
| | ACGCCUCCCUGGGCACCUACCACGACCUGCUGAAGAUCAUCAAGGACAAGGACUUCCUGGACAACGAGGAGAACGAGGACAUCCUG | |
| | GAGGACAUCGUGCUGACCCUGACCCUGUUCGAGGACCGGGAGAUGAUCGAGGAGCGGCUGAAGACCUACGCCCACCUGUUCGACGA | |
| | CAAGGUGAUGAAGCAGCUGAAGCGGCGGCGGUACACCGGCUGGGGCCGGCUGUCCCGGAAGCUGAUCAACGGCAUCCGGGACAAGC | |
| | AGUCCGGCAAGACCAUCCUGGACUUCCUGAAGUCCGACGGCUUCGCCAACCGGAACUUCAUGCAGCUGAUCCACGACGACUCCCUG | |
| | ACCUUCAAGGAGGACAUCCAGAAGGCCCAGGUGUCCGGCCAGGGCGACUCCCUGCACGAGCACAUCGCCAACCUGGCCGGCUCCCC | |
| | CGCCAUCAAGAAGGGCAUCCUGCAGACCGUGAAGGUGGUGGACGAGCUGGUGAAGGUGAUGGGCCGGCACAAGCCCGAGAACAUCG | |
| | UGAUCGAGAUGGCCCGGGAGAACCAGACCACCCAGAAGGGCCAGAAGAACUCCCGGGAGCGGAUGAAGCGGAUCGAGGAGGGCAUC | |
| | AAGGAGCUGGGCUCCCAGAUCCUGAAGGAGCACCCCGUGGAGAACACCCAGCUGCAGAACGAGAAGCUGUACCUGUACUACCUGCA | |
| | GAACGGCCGGGACAUGUACGUGGACCAGGAGCUGGACAUCAACCGGCUGUCCGACUACGACGUGGACCACAUCGUGCCCCAGUCCU | |
| | UCCUGAAGGACGACUCCAUCGACAACAAGGUGCUGACCCGGUCCGACAAGAACCGGGGCAAGUCCGACAACGUGCCCUCCGAGGAG | |
| | GUGGUGAAGAAGAUGAAGAACUACUGGCGGCAGCUGCUGAACGCCAAGCUGAUCACCCAGCGGAAGUUCGACAACCUGACCAAGGC | |
| | CGAGCGGGGCGGCCUGUCCGAGCUGGACAAGGCCGGCUUCAUCAAGCGGCAGCUGGUGGAGACCCGGCAGAUCACCAAGCACGUGG | |
| | CCCAGAUCCUGGACUCCCGGAUGAACACCAAGUACGACGAGAACGACAAGCUGAUCCGGGAGGUGAAGGUGAUCACCCUGAAGUCC | |
| | AAGCUGGUGUCCGACUUCCGGAAGGACUUCCAGUUCUACAAGGUGCGGGAGAUCAACAACUACCACCACGCCCACGACGCCUACCU | |
| | GAACGCCGUGGUGGGCACCGCCCUGAUCAAGAAGUACCCCAAGCUGGAGUCCGAGUUCGUGUACGGCGACUACAAGGUGUACGACG | |
| | UGCGGAAGAUGAUCGCCAAGUCCGAGCAGGAGAUCGGCAAGGCCACCGCCAAGUACUUCUUCUACUCCAACAUCAUGAACUUCUUC | |
| | AAGACCGAGAUCACCCUGGCCAACGGCGAGAUCCGGAAGCGGCCCCUGAUCGAGACCAACGGCGAGACCGGCGAGAUCGUGUGGGA | |
| | CAAGGGCCGGGACUUCGCCACCGUGCGGAAGGUGCUGUCCAUGCCCCAGGUGAACAUCGUGAAGAAGACCGAGGUGCAGACCGGCG | |
| | GCUUCUCCAAGGAGUCCAUCCUGCCCAAGCGGAACUCCGACAAGCUGAUCGCCCGGAAGAAGGACUGGGACCCCAAGAAGUACGGC | |
| | GGCUUCGACUCCCCCACCGUGGCCUACUCCGUGCUGGUGGUGGCCAAGGUGGAGAAGGGCAAGUCCAAGAAGCUGAAGUCCGUGAA | |
| | GGAGCUGCUGGGCAUCACCAUCAUGGAGCGGUCCUCCUUCGAGAAGAACCCCAUCGACUUCCUGGAGGCCAAGGGCUACAAGGAGG | |
| | UGAAGAAGGACCUGAUCAUCAAGCUGCCCAAGUACUCCCUGUUCGAGCUGGAGAACGGCCGGAAGCGGAUGCUGGCCUCCGCCGGC | |
| | GAGCUGCAGAAGGGCAACGAGCUGGCCCUGCCCUCCAAGUACGUGAACUUCCUGUACCUGGCCUCCCACUACGAGAAGCUGAAGGG | |
| | CUCCCCCGAGGACAACGAGCAGAAGCAGCUGUUCGUGGAGCAGCACAAGCACUACCUGGACGAGAUCAUCGAGCAGAUCUCCGAGU | |
| | UCUCCAAGCGGGUGAUCCUGGCCGACGCCAACCUGGACAAGGUGCUGUCCGCCUACAACAAGCACCGGGACAAGCCCAUCCGGGAG | |
| | CAGGCCGAGAACAUCAUCCACCUGUUCACCCUGACCAACCUGGGCGCCCCCGCCGCCUUCAAGUACUUCGACACCACCAUCGACCG | |
| | GAAGCGGUACACCUCCACCAAGGAGGUGCUGGACGCCACCCUGAUCCACCAGUCCAUCACCGGCCUGUACGAGACCCGGAUCGACC | |
| | UGUCCCAGCUGGGCGGCGACGGCGGCGGCUCCCCCAAGAAGAAGCGGAAGGUGUGACUAGCACCAGCCUCAAGAACACCCGAAUGG | |
| | AGUCUCUAAGCUACAUAAUACCAACUUACACUUUACAAAAUGUUGUCCCCCAAAAUGUAGCCAUUCGUAUCUGCUCCUAAUAAAAA | |
| | GAAAGUUUCUUCACAUUCUCUCGAG | |
| mRNA | GGGAAGCUCAGAAUAAACGCUCAACUUUGGCCGGAUCUGCCACCAUGGACAAGAAGUACAGCAUCGGCCUGGACAUCGGCACCAAC | 378 |
| transcript | AGCGUGGGCUGGGCCGUGAUCACCGACGAGUACAAGGUGCCCAGCAAGAAGUUCAAGGUGCUGGGCAACACCGACCGGCACAGCAU | |
| with XBG | CAAGAAGAACCUGAUCGGCGCCCUGCUGUUCGACAGCGGCGAGACCGCCGAGGCCACCCGGCUGAAGCGGACCGCCCGGCGGCGGU | |
| UTRs and | ACACCCGGCGGAAGAACCGGAUCUGCUACCUGCAGGAGAUCUUCAGCAACGAGAUGGCCAAGGUGGACGACAGCUUCUUCCACCGG | |
| Cas9 ORF | CUGGAGGAGAGCUUCCUGGUGGAGGAGGACAAGAAGCACGAGCGGCACCCCAUCUUCGGCAACAUCGUGGACGAGGUGGCCUACCA | |
| with low U/A | CGAGAAGUACCCCACCAUCUACCACCUGCGGAAGAAGCUGGUGGACAGCACCGACAAGGCCGACCUGCGGCUGAUCUACCUGGCCC | |
| codons of | UGGCCCACAUGAUCAAGUUCCGGGGCCACUUCCUGAUCGAGGGCGACCUGAACCCCGACAACAGCGACGUGGACAAGCUGUUCAUC | |
| Table 4 | CAGCUGGUGCAGACCUACAACCAGCUGUUCGAGGAGAACCCCAUCAACGCCAGCGGCGUGGACGCCAAGGCCAUCCUGAGCGCCCG | |
| | GCUGAGCAAGAGCCGGCGGCUGGAGAACCUGAUCGCCCAGCUGCCCGGCGAGAAGAAGAACGGCCUGUUCGGCAACCUGAUCGCCC | |
| | UGAGCCUGGGCCUGACCCCCAACUUCAAGAGCAACUUCGACCUGGCCGAGGACGCCAAGCUGCAGCUGAGCAAGGACACCUACGAC | |
| | GACGACCUGGACAACCUGCUGGCCCAGAUCGGCGACCAGUACGCCGACCUGUUCCUGGCCGCCAAGAACCUGAGCGACGCCAUCCU | |
| | GCUGAGCGACAUCCUGCGGGUGAACACCGAGAUCACCAAGGCCCCCCUGAGCGCCAGCAUGAUCAAGCGGUACGACGAGCACCACC | |
| | AGGACCUGACCCUGCUGAAGGCCCUGGUGCGGCAGCAGCUGCCCGAGAAGUACAAGGAGAUCUUCUUCGACCAGAGCAAGAACGGC | |
| | UACGCCGGCUACAUCGACGGCGGCGCCAGCCAGGAGGAGUUCUACAAGUUCAUCAAGCCCAUCCUGGAGAAGAUGGACGGCACCGA | |
| | GGAGCUGCUGGUGAAGCUGAACCGGGAGGACCUGCUGCGGAAGCAGCGGACCUUCGACAACGGCAGCAUCCCCCACCAGAUCCACC | |
| | UGGGCGAGCUGCACGCCAUCCUGCGGCGGCAGGAGGACUUCUACCCCUUCCUGAAGGACAACCGGGAGAAGAUCGAGAAGAUCCUG | |
| | ACCUUCCGGAUCCCCUACUACGUGGGCCCCCUGGCCCGGGGCAACAGCCGGUUCGCCUGGAUGACCCGGAAGAGCGAGGAGACCAU | |
| | CACCCCCUGGAACUUCGAGGAGGUGGUGGACAAGGGCGCCAGCGCCCAGAGCUUCAUCGAGCGGAUGACCAACUUCGACAAGAACC | |
| | UGCCCAACGAGAAGGUGCUGCCCAAGCACAGCCUGCUGUACGAGUACUUCACCGUGUACAACGAGCUGACCAAGGUGAAGUACGUG | |
| | ACCGAGGGCAUGCGGAAGCCCGCCUUCCUGAGCGGCGAGCAGAAGAAGGCCAUCGUGGACCUGCUGUUCAAGACCAACCGGAAGGU | |
| | GACCGUGAAGCAGCUGAAGGAGGACUACUUCAAGAAGAUCGAGUGCUUCGACAGCGUGGAGAUCAGCGGCGUGGAGGACCGGUUCA | |
| | ACGCCAGCCUGGGCACCUACCACGACCUGCUGAAGAUCAUCAAGGACAAGGACUUCCUGGACAACGAGGAGAACGAGGACAUCCUG | |
| | GAGGACAUCGUGCUGACCCUGACCCUGUUCGAGGACCGGGAGAUGAUCGAGGAGCGGCUGAAGACCUACGCCCACCUGUUCGACGA | |
| | CAAGGUGAUGAAGCAGCUGAAGCGGCGGCGGUACACCGGCUGGGGCCGGCUGAGCCGGAAGCUGAUCAACGGCAUCCGGGACAAGC | |
| | AGAGCGGCAAGACCAUCCUGGACUUCCUGAAGAGCGACGGCUUCGCCAACCGGAACUUCAUGCAGCUGAUCCACGACGACAGCCUG | |
| | ACCUUCAAGGAGGACAUCCAGAAGGCCCAGGUGAGCGGCCAGGGCGACAGCCUGCACGAGCACAUCGCCAACCUGGCCGGCAGCCC | |
| | CGCCAUCAAGAAGGGCAUCCUGCAGACCGUGAAGGUGGUGGACGAGCUGGUGAAGGUGAUGGGCCGGCACAAGCCCGAGAACAUCG | |
| | UGAUCGAGAUGGCCCGGGAGAACCAGACCACCCAGAAGGGCCAGAAGAACAGCCGGGAGCGGAUGAAGCGGAUCGAGGAGGGCAUC | |
| | AAGGAGCUGGGCAGCCAGAUCCUGAAGGAGCACCCCGUGGAGAACACCCAGCUGCAGAACGAGAAGCUGUACCUGUACUACCUGCA | |
| | GAACGGCCGGGACAUGUACGUGGACCAGGAGCUGGACAUCAACCGGCUGAGCGACUACGACGUGGACCACAUCGUGCCCCAGAGCU | |
| | UCCUGAAGGACGACAGCAUCGACAACAAGGUGCUGACCCGGAGCGACAAGAACCGGGGCAAGAGCGACAACGUGCCCAGCGAGGAG | |
| | GUGGUGAAGAAGAUGAAGAACUACUGGCGGCAGCUGCUGAACGCCAAGCUGAUCACCCAGCGGAAGUUCGACAACCUGACCAAGGC | |
| | CGAGCGGGGCGGCCUGAGCGAGCUGGACAAGGCCGGCUUCAUCAAGCGGCAGCUGGUGGAGACCCGGCAGAUCACCAAGCACGUGG | |
| | CCCAGAUCCUGGACAGCCGGAUGAACACCAAGUACGACGAGAACGACAAGCUGAUCCGGGAGGUGAAGGUGAUCACCCUGAAGAGC | |
| | AAGCUGGUGAGCGACUUCCGGAAGGACUUCCAGUUCUACAAGGUGCGGGAGAUCAACAACUACCACCACGCCCACGACGCCUACCU | |
| | GAACGCCGUGGUGGGCACCGCCCUGAUCAAGAAGUACCCCAAGCUGGAGAGCGAGUUCGUGUACGGCGACUACAAGGUGUACGACG | |
| | UGCGGAAGAUGAUCGCCAAGAGCGAGCAGGAGAUCGGCAAGGCCACCGCCAAGUACUUCUUCUACAGCAACAUCAUGAACUUCUUC | |
| | AAGACCGAGAUCACCCUGGCCAACGGCGAGAUCCGGAAGCGGCCCCUGAUCGAGACCAACGGCGAGACCGGCGAGAUCGUGUGGGA | |
| | CAAGGGCCGGGACUUCGCCACCGUGCGGAAGGUGCUGAGCAUGCCCCAGGUGAACAUCGUGAAGAAGACCGAGGUGCAGACCGGCG | |
| | GCUUCAGCAAGGAGAGCAUCCUGCCCAAGCGGAACAGCGACAAGCUGAUCGCCCGGAAGAAGGACUGGGACCCCAAGAAGUACGGC | |
| | GGCUUCGACAGCCCCACCGUGGCCUACAGCGUGCUGGUGGUGGCCAAGGUGGAGAAGGGCAAGAGCAAGAAGCUGAAGAGCGUGAA | |
| | GGAGCUGCUGGGCAUCACCAUCAUGGAGCGGAGCAGCUUCGAGAAGAACCCCAUCGACUUCCUGGAGGCCAAGGGCUACAAGGAGG | |
| | UGAAGAAGGACCUGAUCAUCAAGCUGCCCAAGUACAGCCUGUUCGAGCUGGAGAACGGCCGGAAGCGGAUGCUGGCCAGCGCCGGC | |
| | GAGCUGCAGAAGGGCAACGAGCUGGCCCUGCCCAGCAAGUACGUGAACUUCCUGUACCUGGCCAGCCACUACGAGAAGCUGAAGGG | |
| | CAGCCCCGAGGACAACGAGCAGAAGCAGCUGUUCGUGGAGCAGCACAAGCACUACCUGGACGAGAUCAUCGAGCAGAUCAGCGAGU | |
| | UCAGCAAGCGGGUGAUCCUGGCCGACGCCAACCUGGACAAGGUGCUGAGCGCCUACAACAAGCACCGGGACAAGCCCAUCCGGGAG | |
| | CAGGCCGAGAACAUCAUCCACCUGUUCACCCUGACCAACCUGGGCGCCCCCGCCGCCUUCAAGUACUUCGACACCACCAUCGACCG | |
| | GAAGCGGUACACCAGCACCAAGGAGGUGCUGGACGCCACCCUGAUCCACCAGAGCAUCACCGGCCUGUACGAGACCCGGAUCGACC | |
| | UGAGCCAGCUGGGCGGCGACGGCGGCGGCAGCCCCAAGAAGAAGCGGAAGGUGUGACUAGCACCAGCCUCAAGAACACCCGAAUGG | |
| | AGUCUCUAAGCUACAUAAUACCAACUUACACUUUACAAAAUGUUGUCCCCCAAAAUGUAGCCAUUCGUAUCUGCUCCUAAUAAAAA | |
| | GAAAGUUUCUUCACAUUCUCUCGAG | |
| mRNA | GGGTCCCGCAGTCGGCGTCCAGCGGCTCTGCTTGTTCGTGTGTGTGTCGTTGCAGGCCTTATTCGGATCCGCCACCATGGACAAGA | 379 |
| transcript | AGTACAGCATCGGACTGGACATCGGAACAAACAGCGTCGGATGGGCAGTCATCACAGACGAATACAAGGTCCCGAGCAAGAAGTTC | |
| with ORF | AAGGTCCTGGGAAACACAGACAGACACAGCATCAAGAAGAACCTGATCGGAGCACTGCTGTTCGACAGCGGAGAAACAGCAGAAGC | |
| encoding | AACAAGACTGAAGAGAACAGCAAGAAGAAGATACACAAGAAGAAAGAACAGAATCTGCTACCTGCAGGAAATCTTCAGCAACGAAA | |
| Cas9 with | TGGCAAAGGTCGACGACAGCTTCTTCCACAGACTGGAAGAAAGCTTCCTGGTCGAAGAAGACAAGAAGCACGAAAGACACCCGATC | |
| HiBiT tag, | TTCGGAAACATCGTCGACGAAGTCGCATACCACGAAAAGTACCCGACAATCTACCACCTGAGAAAGAAGCTGGTCGACAGCACAGA | |
| HSD 5′ UTR | CAAGGCAGACCTGAGACTGATCTACCTGGCACTGGCACACATGATCAAGTTCAGAGGACACTTCCTGATCGAAGGAGACCTGAACC | |
| and human | CGGACAACAGCGACGTCGACAAGCTGTTCATCCAGCTGGTCCAGACATACAACCAGCTGTTCGAAGAAAACCCGATCAACGCAAGC | |
| ALB 3′ UTR | GGAGTCGACGCAAAGGCAATCCTGAGCGCAAGACTGAGCAAGAGCAGAAGACTGGAAAACCTGATCGCACAGCTGCCGGGAGAAAA | |
| | GAAGAACGGACTGTTCGGAAACCTGATCGCACTGAGCCTGGGACTGACACCGAACTTCAAGAGCAACTTCGACCTGGCAGAAGACG | |
| | CAAAGCTGCAGCTGAGCAAGGACACATACGACGACGACCTGGACAACCTGCTGGCACAGATCGGAGACCAGTACGCAGACCTGTTC | |
| | CTGGCAGCAAAGAACCTGAGCGACGCAATCCTGCTGAGCGACATCCTGAGAGTCAACACAGAAATCACAAAGGCACCGCTGAGCGC | |
| | AAGCATGATCAAGAGATACGACGAACACCACCAGGACCTGACACTGCTGAAGGCACTGGTCAGACAGCAGCTGCCGGAAAAGTACA | |
| | AGGAAATCTTCTTCGACCAGAGCAAGAACGGATACGCAGGATACATCGACGGAGGAGCAAGCCAGGAAGAATTCTACAAGTTCATC | |
| | AAGCCGATCCTGGAAAAGATGGACGGAACAGAAGAACTGCTGGTCAAGCTGAACAGAGAAGACCTGCTGAGAAAGCAGAGAACATT | |
| | CGACAACGGAAGCATCCCGCACCAGATCCACCTGGGAGAACTGCACGCAATCCTGAGAAGACAGGAAGACTTCTACCCGTTCCTGA | |
| | AGGACAACAGAGAAAAGATCGAAAAGATCCTGACATTCAGAATCCCGTACTACGTCGGACCGCTGGCAAGAGGAAACAGCAGATTC | |
| | GCATGGATGACAAGAAAGAGCGAAGAAACAATCACACCGTGGAACTTCGAAGAAGTCGTCGACAAGGGAGCAAGCGCACAGAGCTT | |
| | CATCGAAAGAATGACAAACTTCGACAAGAACCTGCCGAACGAAAAGGTCCTGCCGAAGCACAGCCTGCTGTACGAATACTTCACAG | |
| | TCTACAACGAACTGACAAAGGTCAAGTACGTCACAGAAGGAATGAGAAAGCCGGCATTCCTGAGCGGAGAACAGAAGAAGGCAATC | |
| | GTCGACCTGCTGTTCAAGACAAACAGAAAGGTCACAGTCAAGCAGCTGAAGGAAGACTACTTCAAGAAGATCGAATGCTTCGACAG | |
| | CGTCGAAATCAGCGGAGTCGAAGACAGATTCAACGCAAGCCTGGGAACATACCACGACCTGCTGAAGATCATCAAGGACAAGGACT | |
| | TCCTGGACAACGAAGAAAACGAAGACATCCTGGAAGACATCGTCCTGACACTGACACTGTTCGAAGACAGAGAAATGATCGAAGAA | |
| | AGACTGAAGACATACGCACACCTGTTCGACGACAAGGTCATGAAGCAGCTGAAGAGAAGAAGATACACAGGATGGGGAAGACTGAG | |
| | CAGAAAGCTGATCAACGGAATCAGAGACAAGCAGAGCGGAAAGACAATCCTGGACTTCCTGAAGAGCGACGGATTCGCAAACAGAA | |
| | ACTTCATGCAGCTGATCCACGACGACAGCCTGACATTCAAGGAAGACATCCAGAAGGCACAGGTCAGCGGACAGGGAGACAGCCTG | |
| | CACGAACACATCGCAAACCTGGCAGGAAGCCCGGCAATCAAGAAGGGAATCCTGCAGACAGTCAAGGTCGTCGACGAACTGGTCAA | |
| | GGTCATGGGAAGACACAAGCCGGAAAACATCGTCATCGAAATGGCAAGAGAAAACCAGACAACACAGAAGGGACAGAAGAACAGCA | |
| | GAGAAAGAATGAAGAGAATCGAAGAAGGAATCAAGGAACTGGGAAGCCAGATCCTGAAGGAACACCCGGTCGAAAACACACAGCTG | |
| | CAGAACGAAAAGCTGTACCTGTACTACCTGCAGAACGGAAGAGACATGTACGTCGACCAGGAACTGGACATCAACAGACTGAGCGA | |
| | CTACGACGTCGACCACATCGTCCCGCAGAGCTTCCTGAAGGACGACAGCATCGACAACAAGGTCCTGACAAGAAGCGACAAGAACA | |
| | GAGGAAAGAGCGACAACGTCCCGAGCGAAGAAGTCGTCAAGAAGATGAAGAACTACTGGAGACAGCTGCTGAACGCAAAGCTGATC | |
| | ACACAGAGAAAGTTCGACAACCTGACAAAGGCAGAGAGAGGAGGACTGAGCGAACTGGACAAGGCAGGATTCATCAAGAGACAGCT | |
| | GGTCGAAACAAGACAGATCACAAAGCACGTCGCACAGATCCTGGACAGCAGAATGAACACAAAGTACGACGAAAACGACAAGCTGA | |
| | TCAGAGAAGTCAAGGTCATCACACTGAAGAGCAAGCTGGTCAGCGACTTCAGAAAGGACTTCCAGTTCTACAAGGTCAGAGAAATC | |
| | AACAACTACCACCACGCACACGACGCATACCTGAACGCAGTCGTCGGAACAGCACTGATCAAGAAGTACCCGAAGCTGGAAAGCGA | |
| | ATTCGTCTACGGAGACTACAAGGTCTACGACGTCAGAAAGATGATCGCAAAGAGCGAACAGGAAATCGGAAAGGCAACAGCAAAGT | |
| | ACTTCTTCTACAGCAACATCATGAACTTCTTCAAGACAGAAATCACACTGGCAAACGGAGAAATCAGAAAGAGACCGCTGATCGAA | |
| | ACAAACGGAGAAACAGGAGAAATCGTCTGGGACAAGGGAAGAGACTTCGCAACAGTCAGAAAGGTCCTGAGCATGCCGCAGGTCAA | |
| | CATCGTCAAGAAGACAGAAGTCCAGACAGGAGGATTCAGCAAGGAAAGCATCCTGCCGAAGAGAAACAGCGACAAGCTGATCGCAA | |
| | GAAAGAAGGACTGGGACCCGAAGAAGTACGGAGGATTCGACAGCCCGACAGTCGCATACAGCGTCCTGGTCGTCGCAAAGGTCGAA | |
| | AAGGGAAAGAGCAAGAAGCTGAAGAGCGTCAAGGAACTGCTGGGAATCACAATCATGGAAAGAAGCAGCTTCGAAAAGAACCCGAT | |
| | CGACTTCCTGGAAGCAAAGGGATACAAGGAAGTCAAGAAGGACCTGATCATCAAGCTGCCGAAGTACAGCCTGTTCGAACTGGAAA | |
| | ACGGAAGAAAGAGAATGCTGGCAAGCGCAGGAGAACTGCAGAAGGGAAACGAACTGGCACTGCCGAGCAAGTACGTCAACTTCCTG | |
| | TACCTGGCAAGCCACTACGAAAAGCTGAAGGGAAGCCCGGAAGACAACGAACAGAAGCAGCTGTTCGTCGAACAGCACAAGCACTA | |
| | CCTGGACGAAATCATCGAACAGATCAGCGAATTCAGCAAGAGAGTCATCCTGGCAGACGCAAACCTGGACAAGGTCCTGAGCGCAT | |
| | ACAACAAGCACAGAGACAAGCCGATCAGAGAACAGGCAGAAAACATCATCCACCTGTTCACACTGACAAACCTGGGAGCACCGGCA | |
| | GCATTCAAGTACTTCGACACAACAATCGACAGAAAGAGATACACAAGCACAAAGGAAGTCCTGGACGCAACACTGATCCACCAGAG | |
| | CATCACAGGACTGTACGAAACAAGAATCGACCTGAGCCAGCTGGGAGGAGACGGAGGAGGAAGCCCGAAGAAGAAGAGAAAGGTCA | |
| | GCGAAAGCGCAACACCGGAAAGCGTCAGCGGATGGAGACTGTTCAAGAAGATCAGCTAGCTAGCCATCACATTTAAAAGCATCTCA | |
| | GCCTACCATGAGAATAAGAGAAAGAAAATGAAGATCAATAGCTTATTCATCTCTTTTTCTTTTTCGTTGGTGTAAAGCCAACACCC | |
| | TGTCTAAAAAACATAAATTTCTTTAATCATTTTGCCTCTTTTCTCTGTGCTTCAATTAATAAAAAATGGAAAGAACCTCGAGAAAA | |
| mRNA | GGGCAGATCGCCTGGAGACGCCATCCACGCTGTTTTGACCTCCATCGCCACCATGGACAAGAAGTACAGCATCGGACTGGACATCG | 380 |
| transcript | GAACAAACAGCGTCGGATGGGCAGTCATCACAGACGAATACAAGGTCCCGAGCAAGAAGTTCAAGGTCCTGGGAAACACAGACAGA | |
| with ORF | CACAGCATCAAGAAGAACCTGATCGGAGCACTGCTGTTCGACAGCGGAGAAACAGCAGAAGCAACAAGACTGAAGAGAACAGCAAG | |
| encoding | AAGAAGATACACAAGAAGAAAGAACAGAATCTGCTACCTGCAGGAAATCTTCAGCAACGAAATGGCAAAGGTCGACGACAGCTTCT | |
| Cas9 with | TCCACAGACTGGAAGAAAGCTTCCTGGTCGAAGAAGACAAGAAGCACGAAAGACACCCGATCTTCGGAAACATCGTCGACGAAGTC | |
| HiBiT tag, | GCATACCACGAAAAGTACCCGACAATCTACCACCTGAGAAAGAAGCTGGTCGACAGCACAGACAAGGCAGACCTGAGACTGATCTA | |
| CMV-1 5′ UTR | CCTGGCACTGGCACACATGATCAAGTTCAGAGGACACTTCCTGATCGAAGGAGACCTGAACCCGGACAACAGCGACGTCGACAAGC | |
| and human | TGTTCATCCAGCTGGTCCAGACATACAACCAGCTGTTCGAAGAAAACCCGATCAACGCAAGCGGAGTCGACGCAAAGGCAATCCTG | |
| ALB 3′ UTR | AGCGCAAGACTGAGCAAGAGCAGAAGACTGGAAAACCTGATCGCACAGCTGCCGGGAGAAAAGAAGAACGGACTGTTCGGAAACCT | |
| | GATCGCACTGAGCCTGGGACTGACACCGAACTTCAAGAGCAACTTCGACCTGGCAGAAGACGCAAAGCTGCAGCTGAGCAAGGACA | |
| | CATACGACGACGACCTGGACAACCTGCTGGCACAGATCGGAGACCAGTACGCAGACCTGTTCCTGGCAGCAAAGAACCTGAGCGAC | |
| | GCAATCCTGCTGAGCGACATCCTGAGAGTCAACACAGAAATCACAAAGGCACCGCTGAGCGCAAGCATGATCAAGAGATACGACGA | |
| | ACACCACCAGGACCTGACACTGCTGAAGGCACTGGTCAGACAGCAGCTGCCGGAAAAGTACAAGGAAATCTTCTTCGACCAGAGCA | |
| | AGAACGGATACGCAGGATACATCGACGGAGGAGCAAGCCAGGAAGAATTCTACAAGTTCATCAAGCCGATCCTGGAAAAGATGGAC | |
| | GGAACAGAAGAACTGCTGGTCAAGCTGAACAGAGAAGACCTGCTGAGAAAGCAGAGAACATTCGACAACGGAAGCATCCCGCACCA | |
| | GATCCACCTGGGAGAACTGCACGCAATCCTGAGAAGACAGGAAGACTTCTACCCGTTCCTGAAGGACAACAGAGAAAAGATCGAAA | |
| | AGATCCTGACATTCAGAATCCCGTACTACGTCGGACCGCTGGCAAGAGGAAACAGCAGATTCGCATGGATGACAAGAAAGAGCGAA | |
| | GAAACAATCACACCGTGGAACTTCGAAGAAGTCGTCGACAAGGGAGCAAGCGCACAGAGCTTCATCGAAAGAATGACAAACTTCGA | |
| | CAAGAACCTGCCGAACGAAAAGGTCCTGCCGAAGCACAGCCTGCTGTACGAATACTTCACAGTCTACAACGAACTGACAAAGGTCA | |
| | AGTACGTCACAGAAGGAATGAGAAAGCCGGCATTCCTGAGCGGAGAACAGAAGAAGGCAATCGTCGACCTGCTGTTCAAGACAAAC | |
| | AGAAAGGTCACAGTCAAGCAGCTGAAGGAAGACTACTTCAAGAAGATCGAATGCTTCGACAGCGTCGAAATCAGCGGAGTCGAAGA | |
| | CAGATTCAACGCAAGCCTGGGAACATACCACGACCTGCTGAAGATCATCAAGGACAAGGACTTCCTGGACAACGAAGAAAACGAAG | |
| | ACATCCTGGAAGACATCGTCCTGACACTGACACTGTTCGAAGACAGAGAAATGATCGAAGAAAGACTGAAGACATACGCACACCTG | |
| | TTCGACGACAAGGTCATGAAGCAGCTGAAGAGAAGAAGATACACAGGATGGGGAAGACTGAGCAGAAAGCTGATCAACGGAATCAG | |
| | AGACAAGCAGAGCGGAAAGACAATCCTGGACTTCCTGAAGAGCGACGGATTCGCAAACAGAAACTTCATGCAGCTGATCCACGACG | |
| | ACAGCCTGACATTCAAGGAAGACATCCAGAAGGCACAGGTCAGCGGACAGGGAGACAGCCTGCACGAACACATCGCAAACCTGGCA | |
| | GGAAGCCCGGCAATCAAGAAGGGAATCCTGCAGACAGTCAAGGTCGTCGACGAACTGGTCAAGGTCATGGGAAGACACAAGCCGGA | |
| | AAACATCGTCATCGAAATGGCAAGAGAAAACCAGACAACACAGAAGGGACAGAAGAACAGCAGAGAAAGAATGAAGAGAATCGAAG | |
| | AAGGAATCAAGGAACTGGGAAGCCAGATCCTGAAGGAACACCCGGTCGAAAACACACAGCTGCAGAACGAAAAGCTGTACCTGTAC | |
| | TACCTGCAGAACGGAAGAGACATGTACGTCGACCAGGAACTGGACATCAACAGACTGAGCGACTACGACGTCGACCACATCGTCCC | |
| | GCAGAGCTTCCTGAAGGACGACAGCATCGACAACAAGGTCCTGACAAGAAGCGACAAGAACAGAGGAAAGAGCGACAACGTCCCGA | |
| | GCGAAGAAGTCGTCAAGAAGATGAAGAACTACTGGAGACAGCTGCTGAACGCAAAGCTGATCACACAGAGAAAGTTCGACAACCTG | |
| | ACAAAGGCAGAGAGAGGAGGACTGAGCGAACTGGACAAGGCAGGATTCATCAAGAGACAGCTGGTCGAAACAAGACAGATCACAAA | |
| | GCACGTCGCACAGATCCTGGACAGCAGAATGAACACAAAGTACGACGAAAACGACAAGCTGATCAGAGAAGTCAAGGTCATCACAC | |
| | TGAAGAGCAAGCTGGTCAGCGACTTCAGAAAGGACTTCCAGTTCTACAAGGTCAGAGAAATCAACAACTACCACCACGCACACGAC | |
| | GCATACCTGAACGCAGTCGTCGGAACAGCACTGATCAAGAAGTACCCGAAGCTGGAAAGCGAATTCGTCTACGGAGACTACAAGGT | |
| | CTACGACGTCAGAAAGATGATCGCAAAGAGCGAACAGGAAATCGGAAAGGCAACAGCAAAGTACTTCTTCTACAGCAACATCATGA | |
| | ACTTCTTCAAGACAGAAATCACACTGGCAAACGGAGAAATCAGAAAGAGACCGCTGATCGAAACAAACGGAGAAACAGGAGAAATC | |
| | GTCTGGGACAAGGGAAGAGACTTCGCAACAGTCAGAAAGGTCCTGAGCATGCCGCAGGTCAACATCGTCAAGAAGACAGAAGTCCA | |
| | GACAGGAGGATTCAGCAAGGAAAGCATCCTGCCGAAGAGAAACAGCGACAAGCTGATCGCAAGAAAGAAGGACTGGGACCCGAAGA | |
| | AGTACGGAGGATTCGACAGCCCGACAGTCGCATACAGCGTCCTGGTCGTCGCAAAGGTCGAAAAGGGAAAGAGCAAGAAGCTGAAG | |
| | AGCGTCAAGGAACTGCTGGGAATCACAATCATGGAAAGAAGCAGCTTCGAAAAGAACCCGATCGACTTCCTGGAAGCAAAGGGATA | |
| | CAAGGAAGTCAAGAAGGACCTGATCATCAAGCTGCCGAAGTACAGCCTGTTCGAACTGGAAAACGGAAGAAAGAGAATGCTGGCAA | |
| | GCGCAGGAGAACTGCAGAAGGGAAACGAACTGGCACTGCCGAGCAAGTACGTCAACTTCCTGTACCTGGCAAGCCACTACGAAAAG | |
| | CTGAAGGGAAGCCCGGAAGACAACGAACAGAAGCAGCTGTTCGTCGAACAGCACAAGCACTACCTGGACGAAATCATCGAACAGAT | |
| | CAGCGAATTCAGCAAGAGAGTCATCCTGGCAGACGCAAACCTGGACAAGGTCCTGAGCGCATACAACAAGCACAGAGACAAGCCGA | |
| | TCAGAGAACAGGCAGAAAACATCATCCACCTGTTCACACTGACAAACCTGGGAGCACCGGCAGCATTCAAGTACTTCGACACAACA | |
| | ATCGACAGAAAGAGATACACAAGCACAAAGGAAGTCCTGGACGCAACACTGATCCACCAGAGCATCACAGGACTGTACGAAACAAG | |
| | AATCGACCTGAGCCAGCTGGGAGGAGACGGAGGAGGAAGCCCGAAGAAGAAGAGAAAGGTCAGCGAAAGCGCAACACCGGAAAGCG | |
| | TCAGCGGATGGAGACTGTTCAAGAAGATCAGCTAGCTAGCCATCACATTTAAAAGCATCTCAGCCTACCATGAGAATAAGAGAAAG | |
| | AAAATGAAGATCAATAGCTTATTCATCTCTTTTTCTTTTTCGTTGGTGTAAAGCCAACACCCTGTCTAAAAAACATAAATTTCTTT | |
| | AATCATTTTGCCTCTTTTCTCTGTGCTTCAATTAATAAAAAATGGAAAGAACCTCGAG | |
| mRNA | GGGAGAAGACACCGGGACCGATCCAGCCTCCGCGGCCGGGAACGGCGCCACCATGGACAAGAAGTACAGCATCGGACTGGACATCG | 381 |
| transcript | GAACAAACAGCGTCGGATGGGCAGTCATCACAGACGAATACAAGGTCCCGAGCAAGAAGTTCAAGGTCCTGGGAAACACAGACAGA | |
| with ORF | CACAGCATCAAGAAGAACCTGATCGGAGCACTGCTGTTCGACAGCGGAGAAACAGCAGAAGCAACAAGACTGAAGAGAACAGCAAG | |
| encoding | AAGAAGATACACAAGAAGAAAGAACAGAATCTGCTACCTGCAGGAAATCTTCAGCAACGAAATGGCAAAGGTCGACGACAGCTTCT | |
| Cas9 with | TCCACAGACTGGAAGAAAGCTTCCTGGTCGAAGAAGACAAGAAGCACGAAAGACACCCGATCTTCGGAAACATCGTCGACGAAGTC | |
| HiBiT tag, | GCATACCACGAAAAGTACCCGACAATCTACCACCTGAGAAAGAAGCTGGTCGACAGCACAGACAAGGCAGACCTGAGACTGATCTA | |
| CNV-2 5′ UTR | CCTGGCACTGGCACACATGATCAAGTTCAGAGGACACTTCCTGATCGAAGGAGACCTGAACCCGGACAACAGCGACGTCGACAAGC | |
| and human | TGTTCATCCAGCTGGTCCAGACATACAACCAGCTGTTCGAAGAAAACCCGATCAACGCAAGCGGAGTCGACGCAAAGGCAATCCTG | |
| ALB 3′ UTR | AGCGCAAGACTGAGCAAGAGCAGAAGACTGGAAAACCTGATCGCACAGCTGCCGGGAGAAAAGAAGAACGGACTGTTCGGAAACCT | |
| | GATCGCACTGAGCCTGGGACTGACACCGAACTTCAAGAGCAACTTCGACCTGGCAGAAGACGCAAAGCTGCAGCTGAGCAAGGACA | |
| | CATACGACGACGACCTGGACAACCTGCTGGCACAGATCGGAGACCAGTACGCAGACCTGTTCCTGGCAGCAAAGAACCTGAGCGAC | |
| | GCAATCCTGCTGAGCGACATCCTGAGAGTCAACACAGAAATCACAAAGGCACCGCTGAGCGCAAGCATGATCAAGAGATACGACGA | |
| | ACACCACCAGGACCTGACACTGCTGAAGGCACTGGTCAGACAGCAGCTGCCGGAAAAGTACAAGGAAATCTTCTTCGACCAGAGCA | |
| | AGAACGGATACGCAGGATACATCGACGGAGGAGCAAGCCAGGAAGAATTCTACAAGTTCATCAAGCCGATCCTGGAAAAGATGGAC | |
| | GGAACAGAAGAACTGCTGGTCAAGCTGAACAGAGAAGACCTGCTGAGAAAGCAGAGAACATTCGACAACGGAAGCATCCCGCACCA | |
| | GATCCACCTGGGAGAACTGCACGCAATCCTGAGAAGACAGGAAGACTTCTACCCGTTCCTGAAGGACAACAGAGAAAAGATCGAAA | |
| | AGATCCTGACATTCAGAATCCCGTACTACGTCGGACCGCTGGCAAGAGGAAACAGCAGATTCGCATGGATGACAAGAAAGAGCGAA | |
| | GAAACAATCACACCGTGGAACTTCGAAGAAGTCGTCGACAAGGGAGCAAGCGCACAGAGCTTCATCGAAAGAATGACAAACTTCGA | |
| | CAAGAACCTGCCGAACGAAAAGGTCCTGCCGAAGCACAGCCTGCTGTACGAATACTTCACAGTCTACAACGAACTGACAAAGGTCA | |
| | AGTACGTCACAGAAGGAATGAGAAAGCCGGCATTCCTGAGCGGAGAACAGAAGAAGGCAATCGTCGACCTGCTGTTCAAGACAAAC | |
| | AGAAAGGTCACAGTCAAGCAGCTGAAGGAAGACTACTTCAAGAAGATCGAATGCTTCGACAGCGTCGAAATCAGCGGAGTCGAAGA | |
| | CAGATTCAACGCAAGCCTGGGAACATACCACGACCTGCTGAAGATCATCAAGGACAAGGACTTCCTGGACAACGAAGAAAACGAAG | |
| | ACATCCTGGAAGACATCGTCCTGACACTGACACTGTTCGAAGACAGAGAAATGATCGAAGAAAGACTGAAGACATACGCACACCTG | |
| | TTCGACGACAAGGTCATGAAGCAGCTGAAGAGAAGAAGATACACAGGATGGGGAAGACTGAGCAGAAAGCTGATCAACGGAATCAG | |
| | AGACAAGCAGAGCGGAAAGACAATCCTGGACTTCCTGAAGAGCGACGGATTCGCAAACAGAAACTTCATGCAGCTGATCCACGACG | |
| | ACAGCCTGACATTCAAGGAAGACATCCAGAAGGCACAGGTCAGCGGACAGGGAGACAGCCTGCACGAACACATCGCAAACCTGGCA | |
| | GGAAGCCCGGCAATCAAGAAGGGAATCCTGCAGACAGTCAAGGTCGTCGACGAACTGGTCAAGGTCATGGGAAGACACAAGCCGGA | |
| | AAACATCGTCATCGAAATGGCAAGAGAAAACCAGACAACACAGAAGGGACAGAAGAACAGCAGAGAAAGAATGAAGAGAATCGAAG | |
| | AAGGAATCAAGGAACTGGGAAGCCAGATCCTGAAGGAACACCCGGTCGAAAACACACAGCTGCAGAACGAAAAGCTGTACCTGTAC | |
| | TACCTGCAGAACGGAAGAGACATGTACGTCGACCAGGAACTGGACATCAACAGACTGAGCGACTACGACGTCGACCACATCGTCCC | |
| | GCAGAGCTTCCTGAAGGACGACAGCATCGACAACAAGGTCCTGACAAGAAGCGACAAGAACAGAGGAAAGAGCGACAACGTCCCGA | |
| | GCGAAGAAGTCGTCAAGAAGATGAAGAACTACTGGAGACAGCTGCTGAACGCAAAGCTGATCACACAGAGAAAGTTCGACAACCTG | |
| | ACAAAGGCAGAGAGAGGAGGACTGAGCGAACTGGACAAGGCAGGATTCATCAAGAGACAGCTGGTCGAAAGAAGACAGATCACAAA | |
| | GCACGTCGCACAGATCCTGGACAGCAGAATGAACACAAAGTACGACGAAAACGACAAGCTGATCAGAGAAGTCAAGGTCATCACAC | |
| | TGAAGAGCAAGCTGGTCAGCGACTTCAGAAAGGACTTCCAGTTCTACAAGGTCAGAGAAATCAACAACTACCACCACGCACACGAC | |
| | GCATACCTGAACGCAGTCGTCGGAACAGCACTGATCAAGAAGTACCCGAAGCTGGAAAGCGAATTCGTCTACGGAGACTACAAGGT | |
| | CTACGACGTCAGAAAGATGATCGCAAAGAGCGAACAGGAAATCGGAAAGGCAACAGCAAAGTACTTCTTCTACAGCAACATCATGA | |
| | ACTTCTTCAAGACAGAAATCACACTGGCAAACGGAGAAATCAGAAAGAGACCGCTGATCGAAACAAACGGAGAAACAGGAGAAATC | |
| | GTCTGGGACAAGGGAAGAGACTTCGCAACAGTCAGAAAGGTCCTGAGCATGCCGCAGGTCAACATCGTCAAGAAGACAGAAGTCCA | |
| | GACAGGAGGATTCAGCAAGGAAAGCATCCTGCCGAAGAGAAACAGCGACAAGCTGATCGCAAGAAAGAAGGACTGGGACCCGAAGA | |
| | AGTACGGAGGATTCGACAGCCCGACAGTCGCATACAGCGTCCTGGTCGTCGCAAAGGTCGAAAAGGGAAAGAGCAAGAAGCTGAAG | |
| | AGCGTCAAGGAACTGCTGGGAATCACAATCATGGAAAGAAGCAGCTTCGAAAAGAACCCGATCGACTTCCTGGAAGCAAAGGGATA | |
| | CAAGGAAGTCAAGAAGGACCTGATCATCAAGCTGCCGAAGTACAGCCTGTTCGAACTGGAAAACGGAAGAAAGAGAATGCTGGCAA | |
| | GCGCAGGAGAACTGCAGAAGGGAAACGAACTGGCACTGCCGAGCAAGTACGTCAACTTCCTGTACCTGGCAAGCCACTACGAAAAG | |
| | CTGAAGGGAAGCCCGGAAGACAACGAACAGAAGCAGCTGTTCGTCGAACAGCACAAGCACTACCTGGACGAAATCATCGAACAGAT | |
| | CAGCGAATTCAGCAAGAGAGTCATCCTGGCAGACGCAAACCTGGACAAGGTCCTGAGCGCATACAACAAGCACAGAGACAAGCCGA | |
| | TCAGAGAACAGGCAGAAAACATCATCCACCTGTTCACACTGACAAACCTGGGAGCACCGGCAGCATTCAAGTACTTCGACACAACA | |
| | ATCGACAGAAAGAGATACACAAGCACAAAGGAAGTCCTGGACGCAACACTGATCCACCAGAGCATCACAGGACTGTACGAAACAAG | |
| | AATCGACCTGAGCCAGCTGGGAGGAGACGGAGGAGGAAGCCCGAAGAAGAAGAGAAAGGTCAGCGAAAGCGCAACACCGGAAAGCG | |
| | TCAGCGGATGGAGACTGTTCAAGAAGATCAGCTAGCTAGCCATCACATTTAAAAGCATCTCAGCCTACCATGAGAATAAGAGAAAG | |
| | AAAATGAAGATCAATAGCTTATTCATCTCTTTTTCTTTTTCGTTGGTGTAAAGCCAACACCCTGTCTAAAAAACATAAATTTCTTT | |
| | AATCATTTTGCCTCTTTTCTCTGTGCTTCAATTAATAAAAAATGGAAAGAACCTCGAG | |
| mRNA | GGGTGCATTGGAACGCGGATTCCCCGTGCCAAGAGTGACTCACCGCGCCACCATGGACAAGAAGTACAGCATCGGACTGGACATCG | 382 |
| transcript | GAACAAACAGCGTCGGATGGGCAGTCATCACAGACGAATACAAGGTCCCGAGCAAGAAGTTCAAGGTCCTGGGAAACACAGACAGA | |
| with ORF | CACAGCATCAAGAAGAACCTGATCGGAGCACTGCTGTTCGACAGCGGAGAAACAGCAGAAGCAACAAGACTGAAGAGAACAGCAAG | |
| encoding | AAGAAGATACACAAGAAGAAAGAACAGAATCTGCTACCTGCAGGAAATCTTCAGCAACGAAATGGCAAAGGTCGACGACAGCTTCT | |
| Cas9 with | TCCACAGACTGGAAGAAAGCTTCCTGGTCGAAGAAGACAAGAAGCACGAAAGACACCCGATCTTCGGAAACATCGTCGACGAAGTC | |
| HiBiT tag, | GCATACCACGAAAAGTACCCGACAATCTACCACCTGAGAAAGAAGCTGGTCGACAGCACAGACAAGGCAGACCTGAGACTGATCTA | |
| CNV-3 5′ UTR | CCTGGCACTGGCACACATGATCAAGTTCAGAGGACACTTCCTGATCGAAGGAGACCTGAACCCGGACAACAGCGACGTCGACAAGC | |
| and human | TGTTCATCCAGCTGGTCCAGACATACAACCAGCTGTTCGAAGAAAACCCGATCAACGCAAGCGGAGTCGACGCAAAGGCAATCCTG | |
| ALB 3′ UTR | AGCGCAAGACTGAGCAAGAGCAGAAGACTGGAAAACCTGATCGCACAGCTGCCGGGAGAAAAGAAGAACGGACTGTTCGGAAACCT | |
| | GATCGCACTGAGCCTGGGACTGACACCGAACTTCAAGAGCAACTTCGACCTGGCAGAAGACGCAAAGCTGCAGCTGAGCAAGGACA | |
| | CATACGACGACGACCTGGACAACCTGCTGGCACAGATCGGAGACCAGTACGCAGACCTGTTCCTGGCAGCAAAGAACCTGAGCGAC | |
| | GCAATCCTGCTGAGCGACATCCTGAGAGTCAACACAGAAATCACAAAGGCACCGCTGAGCGCAAGCATGATCAAGAGATACGACGA | |
| | ACACCACCAGGACCTGACACTGCTGAAGGCACTGGTCAGACAGCAGCTGCCGGAAAAGTACAAGGAAATCTTCTTCGACCAGAGCA | |
| | AGAACGGATACGCAGGATACATCGACGGAGGAGCAAGCCAGGAAGAATTCTACAAGTTCATCAAGCCGATCCTGGAAAAGATGGAC | |
| | GGAACAGAAGAACTGCTGGTCAAGCTGAACAGAGAAGACCTGCTGAGAAAGCAGAGAACATTCGACAACGGAAGCATCCCGCACCA | |
| | GATCCACCTGGGAGAACTGCACGCAATCCTGAGAAGACAGGAAGACTTCTACCCGTTCCTGAAGGACAACAGAGAAAAGATCGAAA | |
| | AGATCCTGACATTCAGAATCCCGTACTACGTCGGACCGCTGGCAAGAGGAAACAGCAGATTCGCATGGATGACAAGAAAGAGCGAA | |
| | GAAACAATCACACCGTGGAACTTCGAAGAAGTCGTCGACAAGGGAGCAAGCGCACAGAGCTTCATCGAAAGAATGACAAACTTCGA | |
| | CAAGAACCTGCCGAACGAAAAGGTCCTGCCGAAGCACAGCCTGCTGTACGAATACTTCACAGTCTACAACGAACTGACAAAGGTCA | |
| | AGTACGTCACAGAAGGAATGAGAAAGCCGGCATTCCTGAGCGGAGAACAGAAGAAGGCAATCGTCGACCTGCTGTTCAAGACAAAC | |
| | AGAAAGGTCACAGTCAAGCAGCTGAAGGAAGACTACTTCAAGAAGATCGAATGCTTCGACAGCGTCGAAATCAGCGGAGTCGAAGA | |
| | CAGATTCAACGCAAGCCTGGGAACATACCACGACCTGCTGAAGATCATCAAGGACAAGGACTTCCTGGACAACGAAGAAAACGAAG | |
| | ACATCCTGGAAGACATCGTCCTGACACTGACACTGTTCGAAGACAGAGAAATGATCGAAGAAAGACTGAAGACATACGCACACCTG | |
| | TTCGACGACAAGGTCATGAAGCAGCTGAAGAGAAGAAGATACACAGGATGGGGAAGACTGAGCAGAAAGCTGATCAACGGAATCAG | |
| | AGACAAGCAGAGCGGAAAGACAATCCTGGACTTCCTGAAGAGCGACGGATTCGCAAACAGAAACTTCATGCAGCTGATCCACGACG | |
| | ACAGCCTGACATTCAAGGAAGACATCCAGAAGGCACAGGTCAGCGGACAGGGAGACAGCCTGCACGAACACATCGCAAACCTGGCA | |
| | GGAAGCCCGGCAATCAAGAAGGGAATCCTGCAGACAGTCAAGGTCGTCGACGAACTGGTCAAGGTCATGGGAAGACACAAGCCGGA | |
| | AAACATCGTCATCGAAATGGCAAGAGAAAACCAGACAACACAGAAGGGACAGAAGAACAGCAGAGAAAGAATGAAGAGAATCGAAG | |
| | AAGGAATCAAGGAACTGGGAAGCCAGATCCTGAAGGAACACCCGGTCGAAAACACACAGCTGCAGAACGAAAAGCTGTACCTGTAC | |
| | TACCTGCAGAACGGAAGAGACATGTACGTCGACCAGGAACTGGACATCAACAGACTGAGCGACTACGACGTCGACCACATCGTCCC | |
| | GCAGAGCTTCCTGAAGGACGACAGCATCGACAACAAGGTCCTGACAAGAAGCGACAAGAACAGAGGAAAGAGCGACAACGTCCCGA | |
| | GCGAAGAAGTCGTCAAGAAGATGAAGAACTACTGGAGACAGCTGCTGAACGCAAAGCTGATCACACAGAGAAAGTTCGACAACCTG | |
| | ACAAAGGCAGAGAGAGGAGGACTGAGCGAACTGGACAAGGCAGGATTCATCAAGAGACAGCTGGTCGAAACAAGACAGATCACAAA | |
| | GCACGTCGCACAGATCCTGGACAGCAGAATGAACACAAAGTACGACGAAAACGACAAGCTGATCAGAGAAGTCAAGGTCATCACAC | |
| | TGAAGAGCAAGCTGGTCAGCGACTTCAGAAAGGACTTCCAGTTCTACAAGGTCAGAGAAATCAACAACTACCACCACGCACACGAC | |
| | GCATACCTGAACGCAGTCGTCGGAACAGCACTGATCAAGAAGTACCCGAAGCTGGAAAGCGAATTCGTCTACGGAGACTACAAGGT | |
| | CTACGACGTCAGAAAGATGATCGCAAAGAGCGAACAGGAAATCGGAAAGGCAACAGCAAAGTACTTCTTCTACAGCAACATCATGA | |
| | ACTTCTTCAAGACAGAAATCACACTGGCAAACGGAGAAATCAGAAAGAGACCGCTGATCGAAACAAACGGAGAAACAGGAGAAATC | |
| | GTCTGGGACAAGGGAAGAGACTTCGCAACAGTCAGAAAGGTCCTGAGCATGCCGCAGGTCAACATCGTCAAGAAGACAGAAGTCCA | |
| | GACAGGAGGATTCAGCAAGGAAAGCATCCTGCCGAAGAGAAACAGCGACAAGCTGATCGCAAGAAAGAAGGACTGGGACCCGAAGA | |
| | AGTACGGAGGATTCGACAGCCCGACAGTCGCATACAGCGTCCTGGTCGTCGCAAAGGTCGAAAAGGGAAAGAGCAAGAAGCTGAAG | |
| | AGCGTCAAGGAACTGCTGGGAATCACAATCATGGAAAGAAGCAGCTTCGAAAAGAACCCGATCGACTTCCTGGAAGCAAAGGGATA | |
| | CAAGGAAGTCAAGAAGGACCTGATCATCAAGCTGCCGAAGTACAGCCTGTTCGAACTGGAAAACGGAAGAAAGAGAATGCTGGCAA | |
| | GCGCAGGAGAACTGCAGAAGGGAAACGAACTGGCACTGCCGAGCAAGTACGTCAACTTCCTGTACCTGGCAAGCCACTACGAAAAG | |
| | CTGAAGGGAAGCCCGGAAGACAACGAACAGAAGCAGCTGTTCGTCGAACAGCACAAGCACTACCTGGACGAAATCATCGAACAGAT | |
| | CAGCGAATTCAGCAAGAGAGTCATCCTGGCAGACGCAAACCTGGACAAGGTCCTGAGCGCATACAACAAGCACAGAGACAAGCCGA | |
| | TCAGAGAACAGGCAGAAAACATCATCCACCTGTTCACACTGACAAACCTGGGAGCACCGGCAGCATTCAAGTACTTCGACACAACA | |
| | ATCGACAGAAAGAGATACACAAGCACAAAGGAAGTCCTGGACGCAACACTGATCCACCAGAGCATCACAGGACTGTACGAAACAAG | |
| | AATCGACCTGAGCCAGCTGGGAGGAGACGGAGGAGGAAGCCCGAAGAAGAAGAGAAAGGTCAGCGAAAGCGCAACACCGGAAAGCG | |
| | TCAGCGGATGGAGACTGTTCAAGAAGATCAGCTAGCTAGCCATCACATTTAAAAGCATCTCAGCCTACCATGAGAATAAGAGAAAG | |
| | AAAATGAAGATCAATAGCTTATTCATCTCTTTTTCTTTTTCGTTGGTGTAAAGCCAACACCCTGTCTAAAAAACATAAATTTCTTT | |
| | AATCATTTTGCCTCTTTTCTCTGTGCTTCAATTAATAAAAAATGGAAAGAACCTCGAG | |
| mRNA | GGGCATAAACCCTGGCGCGCTCGCGGCCCGGCACTCTTCTGGTCCCCACAGACTCAGAGAGAACCCACCCGCCACCATGGACAAGA | 383 |
| transcript | AGTACAGCATCGGACTGGACATCGGAACAAACAGCGTCGGATGGGCAGTCATCACAGACGAATACAAGGTCCCGAGCAAGAAGTTC | |
| with ORF | AAGGTCCTGGGAAACACAGACAGACACAGCATCAAGAAGAACCTGATCGGAGCACTGCTGTTCGACAGCGGAGAAACAGCAGAAGC | |
| encoding | AACAAGACTGAAGAGAACAGCAAGAAGAAGATACACAAGAAGAAAGAACAGAATCTGCTACCTGCAGGAAATCTTCAGCAACGAAA | |
| Cas9 with | TGGCAAAGGTCGACGACAGCTTCTTCCACAGACTGGAAGAAAGCTTCCTGGTCGAAGAAGACAAGAAGCACGAAAGACACCCGATC | |
| HiBiT tag, | TTCGGAAACATCGTCGACGAAGTCGCATACCACGAAAAGTACCCGACAATCTACCACCTGAGAAAGAAGCTGGTCGACAGCACAGA | |
| HBA 5′ UTR | CAAGGCAGACCTGAGACTGATCTACCTGGCACTGGCACACATGATCAAGTTCAGAGGACACTTCCTGATCGAAGGAGACCTGAACC | |
| and human | CGGACAACAGCGACGTCGACAAGCTGTTCATCCAGCTGGTCCAGACATACAACCAGCTGTTCGAAGAAAACCCGATCAACGCAAGC | |
| ALB 3′ UTR | GGAGTCGACGCAAAGGCAATCCTGAGCGCAAGACTGAGCAAGAGCAGAAGACTGGAAAACCTGATCGCACAGCTGCCGGGAGAAAA | |
| | GAAGAACGGACTGTTCGGAAACCTGATCGCACTGAGCCTGGGACTGACACCGAACTTCAAGAGCAACTTCGACCTGGCAGAAGACG | |
| | CAAAGCTGCAGCTGAGCAAGGACACATACGACGACGACCTGGACAACCTGCTGGCACAGATCGGAGACCAGTACGCAGACCTGTTC | |
| | CTGGCAGCAAAGAACCTGAGCGACGCAATCCTGCTGAGCGACATCCTGAGAGTCAACACAGAAATCACAAAGGCACCGCTGAGCGC | |
| | AAGCATGATCAAGAGATACGACGAACACCACCAGGACCTGACACTGCTGAAGGCACTGGTCAGACAGCAGCTGCCGGAAAAGTACA | |
| | AGGAAATCTTCTTCGACCAGAGCAAGAACGGATACGCAGGATACATCGACGGAGGAGCAAGCCAGGAAGAATTCTACAAGTTCATC | |
| | AAGCCGATCCTGGAAAAGATGGACGGAACAGAAGAACTGCTGGTCAAGCTGAACAGAGAAGACCTGCTGAGAAAGCAGAGAACATT | |
| | CGACAACGGAAGCATCCCGCACCAGATCCACCTGGGAGAACTGCACGCAATCCTGAGAAGACAGGAAGACTTCTACCCGTTCCTGA | |
| | AGGACAACAGAGAAAAGATCGAAAAGATCCTGACATTCAGAATCCCGTACTACGTCGGACCGCTGGCAAGAGGAAACAGCAGATTC | |
| | GCATGGATGACAAGAAAGAGCGAAGAAACAATCACACCGTGGAACTTCGAAGAAGTCGTCGACAAGGGAGCAAGCGCACAGAGCTT | |
| | CATCGAAAGAATGACAAACTTCGACAAGAACCTGCCGAACGAAAAGGTCCTGCCGAAGCACAGCCTGCTGTACGAATACTTCACAG | |
| | TCTACAACGAACTGACAAAGGTCAAGTACGTCACAGAAGGAATGAGAAAGCCGGCATTCCTGAGCGGAGAACAGAAGAAGGCAATC | |
| | GTCGACCTGCTGTTCAAGACAAACAGAAAGGTCACAGTCAAGCAGCTGAAGGAAGACTACTTCAAGAAGATCGAATGCTTCGACAG | |
| | CGTCGAAATCAGCGGAGTCGAAGACAGATTCAACGCAAGCCTGGGAACATACCACGACCTGCTGAAGATCATCAAGGACAAGGACT | |
| | TCCTGGACAACGAAGAAAACGAAGACATCCTGGAAGACATCGTCCTGACACTGACACTGTTCGAAGACAGAGAAATGATCGAAGAA | |
| | AGACTGAAGACATACGCACACCTGTTCGACGACAAGGTCATGAAGCAGCTGAAGAGAAGAAGATACACAGGATGGGGAAGACTGAG | |
| | CAGAAAGCTGATCAACGGAATCAGAGACAAGCAGAGCGGAAAGACAATCCTGGACTTCCTGAAGAGCGACGGATTCGCAAACAGAA | |
| | ACTTCATGCAGCTGATCCACGACGACAGCCTGACATTCAAGGAAGACATCCAGAAGGCACAGGTCAGCGGACAGGGAGACAGCCTG | |
| | CACGAACACATCGCAAACCTGGCAGGAAGCCCGGCAATCAAGAAGGGAATCCTGCAGACAGTCAAGGTCGTCGACGAACTGGTCAA | |
| | GGTCATGGGAAGACACAAGCCGGAAAACATCGTCATCGAAATGGCAAGAGAAAACCAGACAACACAGAAGGGACAGAAGAACAGCA | |
| | GAGAAAGAATGAAGAGAATCGAAGAAGGAATCAAGGAACTGGGAAGCCAGATCCTGAAGGAACACCCGGTCGAAAACACACAGCTG | |
| | CAGAACGAAAAGCTGTACCTGTACTACCTGCAGAACGGAAGAGACATGTACGTCGACCAGGAACTGGACATCAACAGACTGAGCGA | |
| | CTACGACGTCGACCACATCGTCCCGCAGAGCTTCCTGAAGGACGACAGCATCGACAACAAGGTCCTGACAAGAAGCGACAAGAACA | |
| | GAGGAAAGAGCGACAACGTCCCGAGCGAAGAAGTCGTCAAGAAGATGAAGAACTACTGGAGACAGCTGCTGAACGCAAAGCTGATC | |
| | ACACAGAGAAAGTTCGACAACCTGACAAAGGCAGAGAGAGGAGGACTGAGCGAACTGGACAAGGCAGGATTCATCAAGAGACAGCT | |
| | GGTCGAAACAAGACAGATCACAAAGCACGTCGCACAGATCCTGGACAGCAGAATGAACACAAAGTACGACGAAAACGACAAGCTGA | |
| | TCAGAGAAGTCAAGGTCATCACACTGAAGAGCAAGCTGGTCAGCGACTTCAGAAAGGACTTCCAGTTCTACAAGGTCAGAGAAATC | |
| | AACAACTACCACCACGCACACGACGCATACCTGAACGCAGTCGTCGGAACAGCACTGATCAAGAAGTACCCGAAGCTGGAAAGCGA | |
| | ATTCGTCTACGGAGACTACAAGGTCTACGACGTCAGAAAGATGATCGCAAAGAGCGAACAGGAAATCGGAAAGGCAACAGCAAAGT | |
| | ACTTCTTCTACAGCAACATCATGAACTTCTTCAAGACAGAAATCACACTGGCAAACGGAGAAATCAGAAAGAGACCGCTGATCGAA | |
| | ACAAACGGAGAAACAGGAGAAATCGTCTGGGACAAGGGAAGAGACTTCGCAACAGTCAGAAAGGTCCTGAGCATGCCGCAGGTCAA | |
| | CATCGTCAAGAAGACAGAAGTCCAGACAGGAGGATTCAGCAAGGAAAGCATCCTGCCGAAGAGAAACAGCGACAAGCTGATCGCAA | |
| | GAAAGAAGGACTGGGACCCGAAGAAGTACGGAGGATTCGACAGCCCGACAGTCGCATACAGCGTCCTGGTCGTCGCAAAGGTCGAA | |
| | AAGGGAAAGAGCAAGAAGCTGAAGAGCGTCAAGGAACTGCTGGGAATCACAATCATGGAAAGAAGCAGCTTCGAAAAGAACCCGAT | |
| | CGACTTCCTGGAAGCAAAGGGATACAAGGAAGTCAAGAAGGACCTGATCATCAAGCTGCCGAAGTACAGCCTGTTCGAACTGGAAA | |
| | ACGGAAGAAAGAGAATGCTGGCAAGCGCAGGAGAACTGCAGAAGGGAAACGAACTGGCACTGCCGAGCAAGTACGTCAACTTCCTG | |
| | TACCTGGCAAGCCACTACGAAAAGCTGAAGGGAAGCCCGGAAGACAACGAACAGAAGCAGCTGTTCGTCGAACAGCACAAGCACTA | |
| | CCTGGACGAAATCATCGAACAGATCAGCGAATTCAGCAAGAGAGTCATCCTGGCAGACGCAAACCTGGACAAGGTCCTGAGCGCAT | |
| | ACAACAAGCACAGAGACAAGCCGATCAGAGAACAGGCAGAAAACATCATCCACCTGTTCACACTGACAAACCTGGGAGCACCGGCA | |
| | GCATTCAAGTACTTCGACACAACAATCGACAGAAAGAGATACACAAGCACAAAGGAAGTCCTGGACGCAACACTGATCCACCAGAG | |
| | CATCACAGGACTGTACGAAACAAGAATCGACCTGAGCCAGCTGGGAGGAGACGGAGGAGGAAGCCCGAAGAAGAAGAGAAAGGTCA | |
| | GCGAAAGCGCAACACCGGAAAGCGTCAGCGGATGGAGACTGTTCAAGAAGATCAGCTAGCTAGCCATCACATTTAAAAGCATCTCA | |
| | GCCTACCATGAGAATAAGAGAAAGAAAATGAAGATCAATAGCTTATTCATCTCTTTTTCTTTTTCGTTGGTGTAAAGCCAACACCC | |
| | TGTCTAAAAAACATAAATTTCTTTAATCATTTTGCCTCTTTTCTCTGTGCTTCAATTAATAAAAAATGGAAAGAACCTCGAGAAAA | |
| mRNA | GGGACATTTGCTTCTGACACAACTGTGTTCACTAGCAACCTCAAACAGACACCGGATCTCGCCACCATGGACAAGAAGTACAGCAT | 384 |
| transcript | CGGACTGGACATCGGAACAAACAGCGTCGGATGGGCAGTCATCACAGACGAATACAAGGTCCCGAGCAAGAAGTTCAAGGTCCTGG | |
| with ORF | GAAACACAGACAGACACAGCATCAAGAAGAACCTGATCGGAGCACTGCTGTTCGACAGCGGAGAAACAGCAGAAGCAACAAGACTG | |
| encoding | AAGAGAACAGCAAGAAGAAGATACACAAGAAGAAAGAACAGAATCTGCTACCTGCAGGAAATCTTCAGCAACGAAATGGCAAAGGT | |
| Cas9 with | CGACGACAGCTTCTTCCACAGACTGGAAGAAAGCTTCCTGGTCGAAGAAGACAAGAAGCACGAAAGACACCCGATCTTCGGAAACA | |
| HiBiT tag, | TCGTCGACGAAGTCGCATACCACGAAAAGTACCCGACAATCTACCACCTGAGAAAGAAGCTGGTCGACAGCACAGACAAGGCAGAC | |
| HBB 5′ UTR | CTGAGACTGATCTACCTGGCACTGGCACACATGATCAAGTTCAGAGGACACTTCCTGATCGAAGGAGACCTGAACCCGGACAACAG | |
| and human | CGACGTCGACAAGCTGTTCATCCAGCTGGTCCAGACATACAACCAGCTGTTCGAAGAAAACCCGATCAACGCAAGCGGAGTCGACG | |
| ALB 3′ UTR | CAAAGGCAATCCTGAGCGCAAGACTGAGCAAGAGCAGAAGACTGGAAAACCTGATCGCACAGCTGCCGGGAGAAAAGAAGAACGGA | |
| | CTGTTCGGAAACCTGATCGCACTGAGCCTGGGACTGACACCGAACTTCAAGAGCAACTTCGACCTGGCAGAAGACGCAAAGCTGCA | |
| | GCTGAGCAAGGACACATACGACGACGACCTGGACAACCTGCTGGCACAGATCGGAGACCAGTACGCAGACCTGTTCCTGGCAGCAA | |
| | AGAACCTGAGCGACGCAATCCTGCTGAGCGACATCCTGAGAGTCAACACAGAAATCACAAAGGCACCGCTGAGCGCAAGCATGATC | |
| | AAGAGATACGACGAACACCACCAGGACCTGACACTGCTGAAGGCACTGGTCAGACAGCAGCTGCCGGAAAAGTACAAGGAAATCTT | |
| | CTTCGACCAGAGCAAGAACGGATACGCAGGATACATCGACGGAGGAGCAAGCCAGGAAGAATTCTACAAGTTCATCAAGCCGATCC | |
| | TGGAAAAGATGGACGGAAGAGAAGAACTGCTGGTCAAGCTGAACAGAGAAGACCTGCTGAGAAAGCAGAGAACATTCGACAACGGA | |
| | AGCATCCCGCACCAGATCCACCTGGGAGAACTGCACGCAATCCTGAGAAGACAGGAAGACTTCTACCCGTTCCTGAAGGACAACAG | |
| | AGAAAAGATCGAAAAGATCCTGACATTCAGAATCCCGTACTACGTCGGACCGCTGGCAAGAGGAAACAGCAGATTCGCATGGATGA | |
| | CAAGAAAGAGCGAAGAAACAATCACACCGTGGAACTTCGAAGAAGTCGTCGACAAGGGAGCAAGCGCACAGAGCTTCATCGAAAGA | |
| | ATGACAAACTTCGACAAGAACCTGCCGAACGAAAAGGTCCTGCCGAAGCACAGCCTGCTGTACGAATACTTCACAGTCTACAACGA | |
| | ACTGACAAAGGTCAAGTACGTCACAGAAGGAATGAGAAAGCCGGCATTCCTGAGCGGAGAACAGAAGAAGGCAATCGTCGACCTGC | |
| | TGTTCAAGACAAACAGAAAGGTCACAGTCAAGCAGCTGAAGGAAGACTACTTCAAGAAGATCGAATGCTTCGACAGCGTCGAAATC | |
| | AGCGGAGTCGAAGACAGATTCAACGCAAGCCTGGGAACATACCACGACCTGCTGAAGATCATCAAGGACAAGGACTTCCTGGACAA | |
| | CGAAGAAAACGAAGACATCCTGGAAGACATCGTCCTGACACTGACACTGTTCGAAGACAGAGAAATGATCGAAGAAAGACTGAAGA | |
| | CATACGCACACCTGTTCGACGACAAGGTCATGAAGCAGCTGAAGAGAAGAAGATACACAGGATGGGGAAGACTGAGCAGAAAGCTG | |
| | ATCAACGGAATCAGAGACAAGCAGAGCGGAAAGACAATCCTGGACTTCCTGAAGAGCGACGGATTCGCAAACAGAAACTTCATGCA | |
| | GCTGATCCACGACGACAGCCTGACATTCAAGGAAGACATCCAGAAGGCACAGGTCAGCGGACAGGGAGACAGCCTGCACGAACACA | |
| | TCGCAAACCTGGCAGGAAGCCCGGCAATCAAGAAGGGAATCCTGCAGACAGTCAAGGTCGTCGACGAACTGGTCAAGGTCATGGGA | |
| | AGACACAAGCCGGAAAACATCGTCATCGAAATGGCAAGAGAAAACCAGACAACACAGAAGGGACAGAAGAACAGCAGAGAAAGAAT | |
| | GAAGAGAATCGAAGAAGGAATCAAGGAACTGGGAAGCCAGATCCTGAAGGAACACCCGGTCGAAAACACACAGCTGCAGAACGAAA | |
| | AGCTGTACCTGTACTACCTGCAGAACGGAAGAGACATGTACGTCGACCAGGAACTGGACATCAACAGACTGAGCGACTACGACGTC | |
| | GACCACATCGTCCCGCAGAGCTTCCTGAAGGACGACAGCATCGACAACAAGGTCCTGACAAGAAGCGACAAGAACAGAGGAAAGAG | |
| | CGACAACGTCCCGAGCGAAGAAGTCGTCAAGAAGATGAAGAACTACTGGAGACAGCTGCTGAACGCAAAGCTGATCACACAGAGAA | |
| | AGTTCGACAACCTGACAAAGGCAGAGAGAGGAGGACTGAGCGAACTGGACAAGGCAGGATTCATCAAGAGACAGCTGGTCGAAACA | |
| | AGACAGATCACAAAGCACGTCGCACAGATCCTGGACAGCAGAATGAACACAAAGTACGACGAAAACGACAAGCTGATCAGAGAAGT | |
| | CAAGGTCATCACACTGAAGAGCAAGCTGGTCAGCGACTTCAGAAAGGACTTCCAGTTCTACAAGGTCAGAGAAATCAACAACTACC | |
| | ACCACGCACACGACGCATACCTGAACGCAGTCGTCGGAACAGCACTGATCAAGAAGTACCCGAAGCTGGAAAGCGAATTCGTCTAC | |
| | GGAGACTACAAGGTCTACGACGTCAGAAAGATGATCGCAAAGAGCGAACAGGAAATCGGAAAGGCAACAGCAAAGTACTTCTTCTA | |
| | CAGCAACATCATGAACTTCTTCAAGACAGAAATCACACTGGCAAACGGAGAAATCAGAAAGAGACCGCTGATCGAAACAAACGGAG | |
| | AAACAGGAGAAATCGTCTGGGACAAGGGAAGAGACTTCGCAACAGTCAGAAAGGTCCTGAGCATGCCGCAGGTCAACATCGTCAAG | |
| | AAGACAGAAGTCCAGACAGGAGGATTCAGCAAGGAAAGCATCCTGCCGAAGAGAAACAGCGACAAGCTGATCGCAAGAAAGAAGGA | |
| | CTGGGACCCGAAGAAGTACGGAGGATTCGACAGCCCGACAGTCGCATACAGCGTCCTGGTCGTCGCAAAGGTCGAAAAGGGAAAGA | |
| | GCAAGAAGCTGAAGAGCGTCAAGGAACTGCTGGGAATCACAATCATGGAAAGAAGCAGCTTCGAAAAGAACCCGATCGACTTCCTG | |
| | GAAGCAAAGGGATACAAGGAAGTCAAGAAGGACCTGATCATCAAGCTGCCGAAGTACAGCCTGTTCGAACTGGAAAACGGAAGAAA | |
| | GAGAATGCTGGCAAGCGCAGGAGAACTGCAGAAGGGAAACGAACTGGCACTGCCGAGCAAGTACGTCAACTTCCTGTACCTGGCAA | |
| | GCCACTACGAAAAGCTGAAGGGAAGCCCGGAAGACAACGAACAGAAGCAGCTGTTCGTCGAACAGCACAAGCACTACCTGGACGAA | |
| | ATCATCGAACAGATCAGCGAATTCAGCAAGAGAGTCATCCTGGCAGACGCAAACCTGGACAAGGTCCTGAGCGCATACAACAAGCA | |
| | CAGAGACAAGCCGATCAGAGAACAGGCAGAAAACATCATCCACCTGTTCACACTGACAAACCTGGGAGCACCGGCAGCATTCAAGT | |
| | ACTTCGACACAACAATCGACAGAAAGAGATACACAAGCACAAAGGAAGTCCTGGACGCAACACTGATCCACCAGAGCATCACAGGA | |
| | CTGTACGAAACAAGAATCGACCTGAGCCAGCTGGGAGGAGACGGAGGAGGAAGCCCGAAGAAGAAGAGAAAGGTCAGCGAAAGCGC | |
| | AACACCGGAAAGCGTCAGCGGATGGAGACTGTTCAAGAAGATCAGCTAGCTAGCCATCACATTTAAAAGCATCTCAGCCTACCATG | |
| | AGAATAAGAGAAAGAAAATGAAGATCAATAGCTTATTCATCTCTTTTTCTTTTTCGTTGGTGTAAAGCCAACACCCTGTCTAAAAA | |
| | ACATAAATTTCTTTAATCATTTTGCCTCTTTTCTCTGTGCTTCAATTAATAAAAAATGGAAAGAACCTCGAGAAAAAAAAAAAAAA | |
| | AAAAAAAAAAAAAAAAAAAAAAAAAAAAAAAAAAAAAAAAAAAAAAAAAAAAAAAAAAAAAAAAAA | |
| mRNA | GGGAAGCTCAGAATAAACGCTCAACTTTGGCCGGATCTCGCCACCATGGACAAGAAGTACAGCATCGGACTGGACATCGGAACAAA | 385 |
| transcript | CAGCGTCGGATGGGCAGTCATCACAGACGAATACAAGGTCCCGAGCAAGAAGTTCAAGGTCCTGGGAAACACAGACAGACACAGCA | |
| with ORF | TCAAGAAGAACCTGATCGGAGCACTGCTGTTCGACAGCGGAGAAACAGCAGAAGCAACAAGACTGAAGAGAACAGCAAGAAGAAGA | |
| encoding | TACACAAGAAGAAAGAACAGAATCTGCTACCTGCAGGAAATCTTCAGCAACGAAATGGCAAAGGTCGACGACAGCTTCTTCCACAG | |
| Cas9 with | ACTGGAAGAAAGCTTCCTGGTCGAAGAAGACAAGAAGCACGAAAGACACCCGATCTTCGGAAACATCGTCGACGAAGTCGCATACC | |
| HiBiT tag, | ACGAAAAGTACCCGACAATCTACCACCTGAGAAAGAAGCTGGTCGACAGCACAGACAAGGCAGACCTGAGACTGATCTACCTGGCA | |
| XBG 5′ UTR | CTGGCACACATGATCAAGTTCAGAGGACACTTCCTGATCGAAGGAGACCTGAACCCGGACAACAGCGACGTCGACAAGCTGTTCAT | |
| and human | CCAGCTGGTCCAGACATACAACCAGCTGTTCGAAGAAAACCCGATCAACGCAAGCGGAGTCGACGCAAAGGCAATCCTGAGCGCAA | |
| ALB 3′ UTR | GACTGAGCAAGAGCAGAAGACTGGAAAACCTGATCGCACAGCTGCCGGGAGAAAAGAAGAACGGACTGTTCGGAAACCTGATCGCA | |
| | CTGAGCCTGGGACTGACACCGAACTTCAAGAGCAACTTCGACCTGGCAGAAGACGCAAAGCTGCAGCTGAGCAAGGACACATACGA | |
| | CGACGACCTGGACAACCTGCTGGCACAGATCGGAGACCAGTACGCAGACCTGTTCCTGGCAGCAAAGAACCTGAGCGACGCAATCC | |
| | TGCTGAGCGACATCCTGAGAGTCAACACAGAAATCACAAAGGCACCGCTGAGCGCAAGCATGATCAAGAGATACGACGAACACCAC | |
| | CAGGACCTGACACTGCTGAAGGCACTGGTCAGACAGCAGCTGCCGGAAAAGTACAAGGAAATCTTCTTCGACCAGAGCAAGAACGG | |
| | ATACGCAGGATACATCGACGGAGGAGCAAGCCAGGAAGAATTCTACAAGTTCATCAAGCCGATCCTGGAAAAGATGGACGGAACAG | |
| | AAGAACTGCTGGTCAAGCTGAACAGAGAAGACCTGCTGAGAAAGCAGAGAACATTCGACAACGGAAGCATCCCGCACCAGATCCAC | |
| | CTGGGAGAACTGCACGCAATCCTGAGAAGACAGGAAGACTTCTACCCGTTCCTGAAGGACAACAGAGAAAAGATCGAAAAGATCCT | |
| | GACATTCAGAATCCCGTACTACGTCGGACCGCTGGCAAGAGGAAACAGCAGATTCGCATGGATGACAAGAAAGAGCGAAGAAACAA | |
| | TCACACCGTGGAACTTCGAAGAAGTCGTCGACAAGGGAGCAAGCGCACAGAGCTTCATCGAAAGAATGACAAACTTCGACAAGAAC | |
| | CTGCCGAACGAAAAGGTCCTGCCGAAGCACAGCCTGCTGTACGAATACTTCACAGTCTACAACGAACTGACAAAGGTCAAGTACGT | |
| | CACAGAAGGAATGAGAAAGCCGGCATTCCTGAGCGGAGAACAGAAGAAGGCAATCGTCGACCTGCTGTTCAAGACAAACAGAAAGG | |
| | TCACAGTCAAGCAGCTGAAGGAAGACTACTTCAAGAAGATCGAATGCTTCGACAGCGTCGAAATCAGCGGAGTCGAAGACAGATTC | |
| | AACGCAAGCCTGGGAACATACCACGACCTGCTGAAGATCATCAAGGACAAGGACTTCCTGGACAACGAAGAAAACGAAGACATCCT | |
| | GGAAGACATCGTCCTGACACTGACACTGTTCGAAGACAGAGAAATGATCGAAGAAAGACTGAAGACATACGCACACCTGTTCGACG | |
| | ACAAGGTCATGAAGCAGCTGAAGAGAAGAAGATACACAGGATGGGGAAGACTGAGCAGAAAGCTGATCAACGGAATCAGAGACAAG | |
| | CAGAGCGGAAAGACAATCCTGGACTTCCTGAAGAGCGACGGATTCGCAAACAGAAACTTCATGCAGCTGATCCACGACGACAGCCT | |
| | GACATTCAAGGAAGACATCCAGAAGGCACAGGTCAGCGGACAGGGAGACAGCCTGCACGAACACATCGCAAACCTGGCAGGAAGCC | |
| | CGGCAATCAAGAAGGGAATCCTGCAGACAGTCAAGGTCGTCGACGAACTGGTCAAGGTCATGGGAAGACACAAGCCGGAAAACATC | |
| | GTCATCGAAATGGCAAGAGAAAACCAGACAACACAGAAGGGACAGAAGAACAGCAGAGAAAGAATGAAGAGAATCGAAGAAGGAAT | |
| | CAAGGAACTGGGAAGCCAGATCCTGAAGGAACACCCGGTCGAAAAGACACAGCTGCAGAACGAAAAGCTGTACCTGTACTACCTGC | |
| | AGAACGGAAGAGACATGTACGTCGACCAGGAACTGGACATCAACAGACTGAGCGACTACGACGTCGACCACATCGTCCCGCAGAGC | |
| | TTCCTGAAGGACGACAGCATCGACAACAAGGTCCTGACAAGAAGCGACAAGAACAGAGGAAAGAGCGACAACGTCCCGAGCGAAGA | |
| | AGTCGTCAAGAAGATGAAGAACTACTGGAGACAGCTGCTGAACGCAAAGCTGATCACACAGAGAAAGTTCGACAACCTGACAAAGG | |
| | CAGAGAGAGGAGGACTGAGCGAACTGGACAAGGCAGGATTCATCAAGAGACAGCTGGTCGAAACAAGACAGATCACAAAGCACGTC | |
| | GCACAGATCCTGGACAGCAGAATGAACACAAAGTACGACGAAAACGACAAGCTGATCAGAGAAGTCAAGGTCATCACACTGAAGAG | |
| | CAAGCTGGTCAGCGACTTCAGAAAGGACTTCCAGTTCTACAAGGTCAGAGAAATCAACAACTACCACCACGCACACGACGCATACC | |
| | TGAACGCAGTCGTCGGAACAGCACTGATCAAGAAGTACCCGAAGCTGGAAAGCGAATTCGTCTACGGAGACTACAAGGTCTACGAC | |
| | GTCAGAAAGATGATCGCAAAGAGCGAACAGGAAATCGGAAAGGCAACAGCAAAGTACTTCTTCTACAGCAACATCATGAACTTCTT | |
| | CAAGACAGAAATCACACTGGCAAACGGAGAAATCAGAAAGAGACCGCTGATCGAAACAAACGGAGAAACAGGAGAAATCGTCTGGG | |
| | ACAAGGGAAGAGACTTCGCAACAGTCAGAAAGGTCCTGAGCATGCCGCAGGTCAACATCGTCAAGAAGACAGAAGTCCAGACAGGA | |
| | GGATTCAGCAAGGAAAGCATCCTGCCGAAGAGAAACAGCGACAAGCTGATCGCAAGAAAGAAGGACTGGGACCCGAAGAAGTACGG | |
| | AGGATTCGACAGCCCGACAGTCGCATACAGCGTCCTGGTCGTCGCAAAGGTCGAAAAGGGAAAGAGCAAGAAGCTGAAGAGCGTCA | |
| | AGGAACTGCTGGGAATCACAATCATGGAAAGAAGCAGCTTCGAAAAGAACCCGATCGACTTCCTGGAAGCAAAGGGATACAAGGAA | |
| | GTCAAGAAGGACCTGATCATCAAGCTGCCGAAGTACAGCCTGTTCGAACTGGAAAACGGAAGAAAGAGAATGCTGGCAAGCGCAGG | |
| | AGAACTGCAGAAGGGAAACGAACTGGCACTGCCGAGCAAGTACGTCAACTTCCTGTACCTGGCAAGCCACTACGAAAAGCTGAAGG | |
| | GAAGCCCGGAAGACAACGAACAGAAGCAGCTGTTCGTCGAACAGCACAAGCACTACCTGGACGAAATCATCGAACAGATCAGCGAA | |
| | TTCAGCAAGAGAGTCATCCTGGCAGACGCAAACCTGGACAAGGTCCTGAGCGCATACAACAAGCACAGAGACAAGCCGATCAGAGA | |
| | ACAGGCAGAAAACATCATCCACCTGTTCACACTGACAAACCTGGGAGCACCGGCAGCATTCAAGTACTTCGACACAACAATCGACA | |
| | GAAAGAGATACACAAGCACAAAGGAAGTCCTGGACGCAACACTGATCCACCAGAGCATCACAGGACTGTACGAAACAAGAATCGAC | |
| | CTGAGCCAGCTGGGAGGAGACGGAGGAGGAAGCCCGAAGAAGAAGAGAAAGGTCAGCGAAAGCGCAACACCGGAAAGCGTCAGCGG | |
| | ATGGAGACTGTTCAAGAAGATCAGCTAGCTAGCCATCACATTTAAAAGCATCTCAGCCTACCATGAGAATAAGAGAAAGAAAATGA | |
| | AGATCAATAGCTTATTCATCTCTTTTTCTTTTTCGTTGGTGTAAAGCCAACACCCTGTCTAAAAAACATAAATTTCTTTAATCATT | |
| | TTGCCTCTTTTCTCTGTGCTTCAATTAATAAAAAATGGAAAGAACCTCGAG | |
| Amino acid | MDKKYSIGLDIGTNSVGWAVITDEYKVPSKKFKVLGNTDRHSIKKNLIGALLFDSGETAEATRLKRTARRRYTRRKNRICYLQEIF | 386 |
| sequence for | SNEMAKVDDSFFHRLEESFLVEEDKKHERHPIFGNIVDEVAYHEKYPTIYHLRKKLVDSTDKADLRLIYLALAHMIKFRGHFLIEG | |
| Cas9 with | DLNPDNSDVDKLFIQLVQTYNQLFEENPINASGVDAKAILSARLSKSRRLENLIAQLPGEKKNGLFGNLIALSLGLTPNFKSNFDL | |
| NLS1 | AEDAKLQLSKDTYDDDLDNLLAQIGDQYADLFLAAKNLSDAILLSDILRVNTEITKAPLSASMIKRYDEHHQDLTLLKALVRQQLP | |
| | EKYKEIFFDQSKNGYAGYIDGGASQEEFYKFIKPILEKMDGTEELLVKLNREDLLRKQRTFDNGSIPHQIHLGELHAILRRQEDFY | |
| | PFLKDNREKIEKILTFRIPYYVGPLARGNSRFAWMTRKSEETITPWNFEEVVDKGASAQSFIERMTNFDKNLPNEKVLPKHSLLYE | |
| | YFTVYNELTKVKYVTEGMRKPAFLSGEQKKAIVDLLFKTNRKVTVKQLKEDYFKKIECFDSVEISGVEDRFNASLGTYHDLLKIIK | |
| | DKDFLDNEENEDILEDIVLTLTLFEDREMIEERLKTYAHLFDDKVMKQLKRRRYTGWGRLSRKLINGIRDKQSGKTILDFLKSDGF | |
| | ANRNFMQLIHDDSLTFKEDIQKAQVSGQGDSLHEHIANLAGSPAIKKGILQTVKVVDELVKVMGRHKPENIVIEMARENQTTQKGQ | |
| | KNSRERMKRIEEGIKELGSQILKEHPVENTQLQNEKLYLYYLQNGRDMYVDQELDINRLSDYDVDHIVPQSFLKDDSIDNKVLTRS | |
| | DKNRGKSDNVPSEEVVKKMKNYWRQLLNAKLITQRKFDNLTKAERGGLSELDKAGFIKRQLVETRQITKHVAQILDSRMNTKYDEN | |
| | DKLIREVKVITLKSKLVSDFRKDFQFYKVREINNYHHAHDAYLNAVVGTALIKKYPKLESEFVYGDYKVYDVRKMIAKSEQEIGKA | |
| | TAKYFFYSNIMNFFKTEITLANGEIRKRPLIETNGETGEIVWDKGRDFATVRKVLSMPQVNIVKKTEVQTGGFSKESILPKRNSDK | |
| | LIARKKDWDPKKYGGFDSPTVAYSVLVVAKVEKGKSKKLKSVKELLGITIMERSSFEKNPIDFLEAKGYKEVKKDLIIKLPKYSLF | |
| | ELENGRKRMLASAGELQKGNELALPSKYVNFLYLASHYEKLKGSPEDNEQKQLFVEQHKHYLDEIIEQISEFSKRVILADANLDKV | |
| | LSAYNKHRDKPIREQAENIIHLFTLTNLGAPAAFKYFDTTIDRKRYTSTKEVLDATLIHQSITGLYETRIDLSQLGGDGGGSLAAK | |
| | RSRTT | |
| Amino acid | MDKKYSIGLDIGTNSVGWAVITDEYKVPSKKFKVLGNTDRHSIKKNLIGALLFDSGETAEATRLKRTARRRYTRRKNRICYLQEIF | 387 |
| sequence for | SNEMAKVDDSFFHRLEESFLVEEDKKHERHPIFGNIVDEVAYHEKYPTIYHLRKKLVDSTDKADLRLIYLALAHMIKFRGHFLIEG | |
| Cas9 with | DLNPDNSDVDKLFIQLVQTYNQLFEENPINASGVDAKAILSARLSKSRRLENLIAQLPGEKKNGLFGNLIALSLGLTPNFKSNFDL | |
| NLS2 | AEDAKLQLSKDTYDDDLDNLLAQIGDQYADLFLAAKNLSDAILLSDILRVNTEITKAPLSASMIKRYDEHHQDLTLLKALVRQQLP | |
| | EKYKEIFFDQSKNGYAGYIDGGASQEEFYKFIKPILEKMDGTEELLVKLNREDLLRKQRTFDNGSIPHQIHLGELHAILRRQEDFY | |
| | PFLKDNREKIEKILTFRIPYYVGPLARGNSRFAWMTRKSEETITPWNFEEVVDKGASAQSFIERMTNFDKNLPNEKVLPKHSLLYE | |
| | YFTVYNELTKVKYVTEGMRKPAFLSGEQKKAIVDLLFKTNRKVTVKQLKEDYFKKIECFDSVEISGVEDRFNASLGTYHDLLKIIK | |
| | DKDFLDNEENEDILEDIVLTLTLFEDREMIEERLKTYAHLFDDKVMKQLKRRRYTGWGRLSRKLINGIRDKQSGKTILDFLKSDGF | |
| | ANRNFMQLIHDDSLTFKEDIQKAQVSGQGDSLHEHIANLAGSPAIKKGILQTVKVVDELVKVMGRHKPENIVIEMARENQTTQKGQ | |
| | KNSRERMKRIEEGIKELGSQILKEHPVENTQLQNEKLYLYYLQNGRDMYVDQELDINRLSDYDVDHIVPQSFLKDDSIDNKVLTRS | |
| | DKNRGKSDNVPSEEVVKKMKNYWRQLLNAKLITQRKFDNLTKAERGGLSELDKAGFIKRQLVETRQITKHVAQILDSRMNTKYDEN | |
| | DKLIREVKVITLKSKLVSDFRKDFQFYKVREINNYHHAHDAYLNAVVGTALIKKYPKLESEFVYGDYKVYDVRKMIAKSEQEIGKA | |
| | TAKYFFYSNIMNFFKTEITLANGEIRKRPLIETNGETGEIVWDKGRDFATVRKVLSMPQVNIVKKTEVQTGGFSKESILPKRNSDK | |
| | LIARKKDWDPKKYGGFDSPTVAYSVLVVAKVEKGKSKKLKSVKELLGITIMERSSFEKNPIDFLEAKGYKEVKKDLIIKLPKYSLF | |
| | ELENGRKRMLASAGELQKGNELALPSKYVNFLYLASHYEKLKGSPEDNEQKQLFVEQHKHYLDEIIEQISEFSKRVILADANLDKV | |
| | LSAYNKHRDKPIREQAENIIHLFTLTNLGAPAAFKYFDTTIDRKRYTSTKEVLDATLIHQSITGLYETRIDLSQLGGDGGGSQAAK | |
| | RSRTT | |
| Amino acid | MDKKYSIGLDIGTNSVGWAVITDEYKVPSKKFKVLGNTDRHSIKKNLIGALLFDSGETAEATRLKRTARRRYTRRKNRICYLQEIF | 388 |
| sequence for | SNEMAKVDDSFFHRLEESFLVEEDKKHERHPIFGNIVDEVAYHEKYPTIYHLRKKLVDSTDKADLRLIYLALAHMIKFRGHFLIEG | |
| Cas9 with | DLNPDNSDVDKLFIQLVQTYNQLFEENPINASGVDAKAILSARLSKSRRLENLIAQLPGEKKNGLFGNLIALSLGLTPNFKSNFDL | |
| NLS3 | AEDAKLQLSKDTYDDDLDNLLAQIGDQYADLFLAAKNLSDAILLSDILRVNTEITKAPLSASMIKRYDEHHQDLTLLKALVRQQLP | |
| | EKYKEIFFDQSKNGYAGYIDGGASQEEFYKFIKPILEKMDGTEELLVKLNREDLLRKQRTFDNGSIPHQIHLGELHAILRRQEDFY | |
| | PFLKDNREKIEKILTFRIPYYVGPLARGNSRFAWMTRKSEETITPWNFEEVVDKGASAQSFIERMTNFDKNLPNEKVLPKHSLLYE | |
| | YFTVYNELTKVKYVTEGMRKPAFLSGEQKKAIVDLLFKTNRKVTVKQLKEDYFKKIECFDSVEISGVEDRFNASLGTYHDLLKIIK | |
| | DKDFLDNEENEDILEDIVLTLTLFEDREMIEERLKTYAHLFDDKVMKQLKRRRYTGWGRLSRKLINGIRDKQSGKTILDFLKSDGF | |
| | ANRNFMQLIHDDSLTFKEDIQKAQVSGQGDSLHEHIANLAGSPAIKKGILQTVKVVDELVKVMGRHKPENIVIEMARENQTTQKGQ | |
| | KNSRERMKRIEEGIKELGSQILKEHPVENTQLQNEKLYLYYLQNGRDMYVDQELDINRLSDYDVDHIVPQSFLKDDSIDNKVLTRS | |
| | DKNRGKSDNVPSEEVVKKMKNYWRQLLNAKLITQRKFDNLTKAERGGLSELDKAGFIKRQLVETRQITKHVAQILDSRMNTKYDEN | |
| | DKLIREVKVITLKSKLVSDFRKDFQFYKVREINNYHHAHDAYLNAVVGTALIKKYPKLESEFVYGDYKVYDVRKMIAKSEQEIGKA | |
| | TAKYFFYSNIMNFFKTEITLANGEIRKRPLIETNGETGEIVWDKGRDFATVRKVLSMPQVNIVKKTEVQTGGFSKESILPKRNSDK | |
| | LIARKKDWDPKKYGGFDSPTVAYSVLVVAKVEKGKSKKLKSVKELLGITIMERSSFEKNPIDFLEAKGYKEVKKDLIIKLPKYSLF | |
| | ELENGRKRMLASAGELQKGNELALPSKYVNFLYLASHYEKLKGSPEDNEQKQLFVEQHKHYLDEIIEQISEFSKRVILADANLDKV | |
| | LSAYNKHRDKPIREQAENIIHLFTLTNLGAPAAFKYFDTTIDRKRYTSTKEVLDATLIHQSITGLYETRIDLSQLGGDGGGSPAPA | |
| | KRERTT | |
| Amino acid | MDKKYSIGLDIGTNSVGWAVITDEYKVPSKKFKVLGNTDRHSIKKNLIGALLFDSGETAEATRLKRTARRRYTRRKNRICYLQEIF | 389 |
| sequence for | SNEMAKVDDSFFHRLEESFLVEEDKKHERHPIFGNIVDEVAYHEKYPTIYHLRKKLVDSTDKADLRLIYLALAHMIKFRGHFLIEG | |
| Cas9 with | DLNPDNSDVDKLFIQLVQTYNQLFEENPINASGVDAKAILSARLSKSRRLENLIAQLPGEKKNGLFGNLIALSLGLTPNFKSNFDL | |
| NLS4 | AEDAKLQLSKDTYDDDLDNLLAQIGDQYADLFLAAKNLSDAILLSDILRVNTEITKAPLSASMIKRYDEHHQDLTLLKALVRQQLP | |
| | EKYKEIFFDQSKNGYAGYIDGGASQEEFYKFIKPILEKMDGTEELLVKLNREDLLRKQRTFDNGSIPHQIHLGELHAILRRQEDFY | |
| | PFLKDNREKIEKILTFRIPYYVGPLARGNSRFAWMTRKSEETITPWNFEEVVDKGASAQSFIERMTNFDKNLPNEKVLPKHSLLYE | |
| | YFTVYNELTKVKYVTEGMRKPAFLSGEQKKAIVDLLFKTNRKVTVKQLKEDYFKKIECFDSVEISGVEDRFNASLGTYHDLLKIIK | |
| | DKDFLDNEENEDILEDIVLTLTLFEDREMIEERLKTYAHLFDDKVMKQLKRRRYTGWGRLSRKLINGIRDKQSGKTILDFLKSDGF | |
| | ANRNFMQLIHDDSLTFKEDIQKAQVSGQGDSLHEHIANLAGSPAIKKGILQTVKVVDELVKVMGRHKPENIVIEMARENQTTQKGQ | |
| | KNSRERMKRIEEGIKELGSQILKEHPVENTQLQNEKLYLYYLQNGRDMYVDQELDINRLSDYDVDHIVPQSFLKDDSIDNKVLTRS | |
| | DKNRGKSDNVPSEEVVKKMKNYWRQLLNAKLITQRKFDNLTKAERGGLSELDKAGFIKRQLVETRQITKHVAQILDSRMNTKYDEN | |
| | DKLIREVKVITLKSKLVSDFRKDFQFYKVREINNYHHAHDAYLNAVVGTALIKKYPKLESEFVYGDYKVYDVRKMIAKSEQEIGKA | |
| | TAKYFFYSNIMNFFKTEITLANGEIRKRPLIETNGETGEIVWDKGRDFATVRKVLSMPQVNIVKKTEVQTGGFSKESILPKRNSDK | |
| | LIARKKDWDPKKYGGFDSPTVAYSVLVVAKVEKGKSKKLKSVKELLGITIMERSSFEKNPIDFLEAKGYKEVKKDLIIKLPKYSLF | |
| | ELENGRKRMLASAGELQKGNELALPSKYVNFLYLASHYEKLKGSPEDNEQKQLFVEQHKHYLDEIIEQISEFSKRVILADANLDKV | |
| | LSAYNKHRDKPIREQAENIIHLFTLTNLGAPAAFKYFDTTIDRKRYTSTKEVLDATLIHQSITGLYETRIDLSQLGGDGGGSQAAK | |
| | RPRTT | |
| Amino acid | MDKKYSIGLDIGTNSVGWAVITDEYKVPSKKFKVLGNTDRHSIKKNLIGALLFDSGETAEATRLKRTARRRYTRRKNRICYLQEIF | 390 |
| sequence for | SNEMAKVDDSFFHRLEESFLVEEDKKHERHPIFGNIVDEVAYHEKYPTIYHLRKKLVDSTDKADLRLIYLALAHMIKFRGHFLIEG | |
| Cas9 with | DLNPDNSDVDKLFIQLVQTYNQLFEENPINASGVDAKAILSARLSKSRRLENLIAQLPGEKKNGLFGNLIALSLGLTPNFKSNFDL | |
| NLS5 | AEDAKLQLSKDTYDDDLDNLLAQIGDQYADLFLAAKNLSDAILLSDILRVNTEITKAPLSASMIKRYDEHHQDLTLLKALVRQQLP | |
| | EKYKEIFFDQSKNGYAGYIDGGASQEEFYKFIKPILEKMDGTEELLVKLNREDLLRKQRTFDNGSIPHQIHLGELHAILRRQEDFY | |
| | PFLKDNREKIEKILTFRIPYYVGPLARGNSRFAWMTRKSEETITPWNFEEVVDKGASAQSFIERMTNFDKNLPNEKVLPKHSLLYE | |
| | YFTVYNELTKVKYVTEGMRKPAFLSGEQKKAIVDLLFKTNRKVTVKQLKEDYFKKIECFDSVEISGVEDRFNASLGTYHDLLKIIK | |
| | DKDFLDNEENEDILEDIVLTLTLFEDREMIEERLKTYAHLFDDKVMKQLKRRRYTGWGRLSRKLINGIRDKQSGKTILDFLKSDGF | |
| | ANRNFMQLIHDDSLTFKEDIQKAQVSGQGDSLHEHIANLAGSPAIKKGILQTVKVVDELVKVMGRHKPENIVIEMARENQTTQKGQ | |
| | KNSRERMKRIEEGIKELGSQILKEHPVENTQLQNEKLYLYYLQNGRDMYVDQELDINRLSDYDVDHIVPQSFLKDDSIDNKVLTRS | |
| | DKNRGKSDNVPSEEVVKKMKNYWRQLLNAKLITQRKFDNLTKAERGGLSELDKAGFIKRQLVETRQITKHVAQILDSRMNTKYDEN | |
| | DKLIREVKVITLKSKLVSDFRKDFQFYKVREINNYHHAHDAYLNAVVGTALIKKYPKLESEFVYGDYKVYDVRKMIAKSEQEIGKA | |
| | TAKYFFYSNIMNFFKTEITLANGEIRKRPLIETNGETGEIVWDKGRDFATVRKVLSMPQVNIVKKTEVQTGGFSKESILPKRNSDK | |
| | LIARKKDWDPKKYGGFDSPTVAYSVLVVAKVEKGKSKKLKSVKELLGITIMERSSFEKNPIDFLEAKGYKEVKKDLIIKLPKYSLF | |
| | ELENGRKRMLASAGELQKGNELALPSKYVNFLYLASHYEKLKGSPEDNEQKQLFVEQHKHYLDEIIEQISEFSKRVILADANLDKV | |
| | LSAYNKHRDKPIREQAENIIHLFTLTNLGAPAAFKYFDTTIDRKRYTSTKEVLDATLIHQSITGLYETRIDLSQLGGDGGGSRAAK | |
| | RPRTT | |
| Amino acid | MDKKYSIGLDIGTNSVGWAVITDEYKVPSKKFKVLGNTDRHSIKKNLIGALLFDSGETAEATRLKRTARRRYTRRKNRICYLQEIF | 391 |
| sequence for | SNEMAKVDDSFFHRLEESFLVEEDKKHERHPIFGNIVDEVAYHEKYPTIYHLRKKLVDSTDKADLRLIYLALAHMIKFRGHFLIEG | |
| Cas9 with | DLNPDNSDVDKLFIQLVQTYNQLFEENPINASGVDAKAILSARLSKSRRLENLIAQLPGEKKNGLFGNLIALSLGLTPNFKSNFDL | |
| NLS6 | AEDAKLQLSKDTYDDDLDNLLAQIGDQYADLFLAAKNLSDAILLSDILRVNTEITKAPLSASMIKRYDEHHQDLTLLKALVRQQLP | |
| | EKYKEIFFDQSKNGYAGYIDGGASQEEFYKFIKPILEKMDGTEELLVKLNREDLLRKQRTFDNGSIPHQIHLGELHAILRRQEDFY | |
| | PFLKDNREKIEKILTFRIPYYVGPLARGNSRFAWMTRKSEETITPWNFEEVVDKGASAQSFIERMTNFDKNLPNEKVLPKHSLLYE | |
| | YFTVYNELTKVKYVTEGMRKPAFLSGEQKKAIVDLLFKTNRKVTVKQLKEDYFKKIECFDSVEISGVEDRFNASLGTYHDLLKIIK | |
| | DKDFLDNEENEDILEDIVLTLTLFEDREMIEERLKTYAHLFDDKVMKQLKRRRYTGWGRLSRKLINGIRDKQSGKTILDFLKSDGF | |
| | ANRNFMQLIHDDSLTFKEDIQKAQVSGQGDSLHEHIANLAGSPAIKKGILQTVKVVDELVKVMGRHKPENIVIEMARENQTTQKGQ | |
| | KNSRERMKRIEEGIKELGSQILKEHPVENTQLQNEKLYLYYLQNGRDMYVDQELDINRLSDYDVDHIVPQSFLKDDSIDNKVLTRS | |
| | DKNRGKSDNVPSEEVVKKMKNYWRQLLNAKLITQRKFDNLTKAERGGLSELDKAGFIKRQLVETRQITKHVAQILDSRMNTKYDEN | |
| | DKLIREVKVITLKSKLVSDFRKDFQFYKVREINNYHHAHDAYLNAVVGTALIKKYPKLESEFVYGDYKVYDVRKMIAKSEQEIGKA | |
| | TAKYFFYSNIMNFFKTEITLANGEIRKRPLIETNGETGEIVWDKGRDFATVRKVLSMPQVNIVKKTEVQTGGFSKESILPKRNSDK | |
| | LIARKKDWDPKKYGGFDSPTVAYSVLVVAKVEKGKSKKLKSVKELLGITIMERSSFEKNPIDFLEAKGYKEVKKDLIIKLPKYSLF | |
| | ELENGRKRMLASAGELQKGNELALPSKYVNFLYLASHYEKLKGSPEDNEQKQLFVEQHKHYLDEIIEQISEFSKRVILADANLDKV | |
| | LSAYNKHRDKPIREQAENIIHLFTLTNLGAPAAFKYFDTTIDRKRYTSTKEVLDATLIHQSITGLYETRIDLSQLGGDGGGSAAAK | |
| | RSWSMAA | |
| Amino acid | MDKKYSIGLDIGTNSVGWAVITDEYKVPSKKFKVLGNTDRHSIKKNLIGALLFDSGETAEATRLKRTARRRYTRRKNRICYLQEIF | 392 |
| sequence for | SNEMAKVDDSFFHRLEESFLVEEDKKHERHPIFGNIVDEVAYHEKYPTIYHLRKKLVDSTDKADLRLIYLALAHMIKFRGHFLIEG | |
| Cas9 with | DLNPDNSDVDKLFIQLVQTYNQLFEENPINASGVDAKAILSARLSKSRRLENLIAQLPGEKKNGLFGNLIALSLGLTPNFKSNFDL | |
| NLS7 | AEDAKLQLSKDTYDDDLDNLLAQIGDQYADLFLAAKNLSDAILLSDILRVNTEITKAPLSASMIKRYDEHHQDLTLLKALVRQQLP | |
| | EKYKEIFFDQSKNGYAGYIDGGASQEEFYKFIKPILEKMDGTEELLVKLNREDLLRKQRTFDNGSIPHQIHLGELHAILRRQEDFY | |
| | PFLKDNREKIEKILTFRIPYYVGPLARGNSRFAWMTRKSEETITPWNFEEVVDKGASAQSFIERMTNFDKNLPNEKVLPKHSLLYE | |
| | YFTVYNELTKVKYVTEGMRKPAFLSGEQKKAIVDLLFKTNRKVTVKQLKEDYFKKIECFDSVEISGVEDRFNASLGTYHDLLKIIK | |
| | DKDFLDNEENEDILEDIVLTLTLFEDREMIEERLKTYAHLFDDKVMKQLKRRRYTGWGRLSRKLINGIRDKQSGKTILDFLKSDGF | |
| | ANRNFMQLIHDDSLTFKEDIQKAQVSGQGDSLHEHIANLAGSPAIKKGILQTVKVVDELVKVMGRHKPENIVIEMARENQTTQKGQ | |
| | KNSRERMKRIEEGIKELGSQILKEHPVENTQLQNEKLYLYYLQNGRDMYVDQELDINRLSDYDVDHIVPQSFLKDDSIDNKVLTRS | |
| | DKNRGKSDNVPSEEVVKKMKNYWRQLLNAKLITQRKFDNLTKAERGGLSELDKAGFIKRQLVETRQITKHVAQILDSRMNTKYDEN | |
| | DKLIREVKVITLKSKLVSDFRKDFQFYKVREINNYHHAHDAYLNAVVGTALIKKYPKLESEFVYGDYKVYDVRKMIAKSEQEIGKA | |
| | TAKYFFYSNIMNFFKTEITLANGEIRKRPLIETNGETGEIVWDKGRDFATVRKVLSMPQVNIVKKTEVQTGGFSKESILPKRNSDK | |
| | LIARKKDWDPKKYGGFDSPTVAYSVLVVAKVEKGKSKKLKSVKELLGITIMERSSFEKNPIDFLEAKGYKEVKKDLIIKLPKYSLF | |
| | ELENGRKRMLASAGELQKGNELALPSKYVNFLYLASHYEKLKGSPEDNEQKQLFVEQHKHYLDEIIEQISEFSKRVILADANLDKV | |
| | LSAYNKHRDKPIREQAENIIHLFTLTNLGAPAAFKYFDTTIDRKRYTSTKEVLDATLIHQSITGLYETRIDLSQLGGDGGGSAAAK | |
| | RVWSMAF | |
| Amino acid | MDKKYSIGLDIGTNSVGWAVITDEYKVPSKKFKVLGNTDRHSIKKNLIGALLFDSGETAEATRLKRTARRRYTRRKNRICYLQEIF | 393 |
| sequence for | SNEMAKVDDSFFHRLEESFLVEEDKKHERHPIFGNIVDEVAYHEKYPTIYHLRKKLVDSTDKADLRLIYLALAHMIKFRGHFLIEG | |
| Cas9 with | DLNPDNSDVDKLFIQLVQTYNQLFEENPINASGVDAKAILSARLSKSRRLENLIAQLPGEKKNGLFGNLIALSLGLTPNFKSNFDL | |
| NLS8 | AEDAKLQLSKDTYDDDLDNLLAQIGDQYADLFLAAKNLSDAILLSDILRVNTEITKAPLSASMIKRYDEHHQDLTLLKALVRQQLP | |
| | EKYKEIFFDQSKNGYAGYIDGGASQEEFYKFIKPILEKMDGTEELLVKLNREDLLRKQRTFDNGSIPHQIHLGELHAILRRQEDFY | |
| | PFLKDNREKIEKILTFRIPYYVGPLARGNSRFAWMTRKSEETITPWNFEEVVDKGASAQSFIERMTNFDKNLPNEKVLPKHSLLYE | |
| | YFTVYNELTKVKYVTEGMRKPAFLSGEQKKAIVDLLFKTNRKVTVKQLKEDYFKKIECFDSVEISGVEDRFNASLGTYHDLLKIIK | |
| | DKDFLDNEENEDILEDIVLTLTLFEDREMIEERLKTYAHLFDDKVMKQLKRRRYTGWGRLSRKLINGIRDKQSGKTILDFLKSDGF | |
| | ANRNFMQLIHDDSLTFKEDIQKAQVSGQGDSLHEHIANLAGSPAIKKGILQTVKVVDELVKVMGRHKPENIVIEMARENQTTQKGQ | |
| | KNSRERMKRIEEGIKELGSQILKEHPVENTQLQNEKLYLYYLQNGRDMYVDQELDINRLSDYDVDHIVPQSFLKDDSIDNKVLTRS | |
| | DKNRGKSDNVPSEEVVKKMKNYWRQLLNAKLITQRKFDNLTKAERGGLSELDKAGFIKRQLVETRQITKHVAQILDSRMNTKYDEN | |
| | DKLIREVKVITLKSKLVSDFRKDFQFYKVREINNYHHAHDAYLNAVVGTALIKKYPKLESEFVYGDYKVYDVRKMIAKSEQEIGKA | |
| | TAKYFFYSNIMNFFKTEITLANGEIRKRPLIETNGETGEIVWDKGRDFATVRKVLSMPQVNIVKKTEVQTGGFSKESILPKRNSDK | |
| | LIARKKDWDPKKYGGFDSPTVAYSVLVVAKVEKGKSKKLKSVKELLGITIMERSSFEKNPIDFLEAKGYKEVKKDLIIKLPKYSLF | |
| | ELENGRKRMLASAGELQKGNELALPSKYVNFLYLASHYEKLKGSPEDNEQKQLFVEQHKHYLDEIIEQISEFSKRVILADANLDKV | |
| | LSAYNKHRDKPIREQAENIIHLFTLTNLGAPAAFKYFDTTIDRKRYTSTKEVLDATLIHQSITGLYETRIDLSQLGGDGGGSAAAK | |
| | RSWSMAF | |
| Amino acid | MDKKYSIGLDIGTNSVGWAVITDEYKVPSKKFKVLGNTDRHSIKKNLIGALLFDSGETAEATRLKRTARRRYTRRKNRICYLQEIF | 394 |
| sequence for | SNEMAKVDDSFFHRLEESFLVEEDKKHERHPIFGNIVDEVAYHEKYPTIYHLRKKLVDSTDKADLRLIYLALAHMIKFRGHFLIEG | |
| Cas9 with | DLNPDNSDVDKLFIQLVQTYNQLFEENPINASGVDAKAILSARLSKSRRLENLIAQLPGEKKNGLFGNLIALSLGLTPNFKSNFDL | |
| NLS9 | AEDAKLQLSKDTYDDDLDNLLAQIGDQYADLFLAAKNLSDAILLSDILRVNTEITKAPLSASMIKRYDEHHQDLTLLKALVRQQLP | |
| | EKYKEIFFDQSKNGYAGYIDGGASQEEFYKFIKPILEKMDGTEELLVKLNREDLLRKQRTFDNGSIPHQIHLGELHAILRRQEDFY | |
| | PFLKDNREKIEKILTFRIPYYVGPLARGNSRFAWMTRKSEETITPWNFEEVVDKGASAQSFIERMTNFDKNLPNEKVLPKHSLLYE | |
| | YFTVYNELTKVKYVTEGMRKPAFLSGEQKKAIVDLLFKTNRKVTVKQLKEDYFKKIECFDSVEISGVEDRFNASLGTYHDLLKIIK | |
| | DKDFLDNEENEDILEDIVLTLTLFEDREMIEERLKTYAHLFDDKVMKQLKRRRYTGWGRLSRKLINGIRDKQSGKTILDFLKSDGF | |
| | ANRNFMQLIHDDSLTFKEDIQKAQVSGQGDSLHEHIANLAGSPAIKKGILQTVKVVDELVKVMGRHKPENIVIEMARENQTTQKGQ | |
| | KNSRERMKRIEEGIKELGSQILKEHPVENTQLQNEKLYLYYLQNGRDMYVDQELDINRLSDYDVDHIVPQSFLKDDSIDNKVLTRS | |
| | DKNRGKSDNVPSEEVVKKMKNYWRQLLNAKLITQRKFDNLTKAERGGLSELDKAGFIKRQLVETRQITKHVAQILDSRMNTKYDEN | |
| | DKLIREVKVITLKSKLVSDFRKDFQFYKVREINNYHHAHDAYLNAVVGTALIKKYPKLESEFVYGDYKVYDVRKMIAKSEQEIGKA | |
| | TAKYFFYSNIMNFFKTEITLANGEIRKRPLIETNGETGEIVWDKGRDFATVRKVLSMPQVNIVKKTEVQTGGFSKESILPKRNSDK | |
| | LIARKKDWDPKKYGGFDSPTVAYSVLVVAKVEKGKSKKLKSVKELLGITIMERSSFEKNPIDFLEAKGYKEVKKDLIIKLPKYSLF | |
| | ELENGRKRMLASAGELQKGNELALPSKYVNFLYLASHYEKLKGSPEDNEQKQLFVEQHKHYLDEIIEQISEFSKRVILADANLDKV | |
| | LSAYNKHRDKPIREQAENIIHLFTLTNLGAPAAFKYFDTTIDRKRYTSTKEVLDATLIHQSITGLYETRIDLSQLGGDGGGSAAAK | |
| | RKYFAA | |
| Amino acid | MDKKYSIGLDIGTNSVGWAVITDEYKVPSKKFKVLGNTDRHSIKKNLIGALLFDSGETAEATRLKRTARRRYTRRKNRICYLQEIF | 395 |
| sequence for | SNEMAKVDDSFFHRLEESFLVEEDKKHERHPIFGNIVDEVAYHEKYPTIYHLRKKLVDSTDKADLRLIYLALAHMIKFRGHFLIEG | |
| Cas9 with | DLNPDNSDVDKLFIQLVQTYNQLFEENPINASGVDAKAILSARLSKSRRLENLIAQLPGEKKNGLFGNLIALSLGLTPNFKSNFDL | |
| NLS10 | AEDAKLQLSKDTYDDDLDNLLAQIGDQYADLFLAAKNLSDAILLSDILRVNTEITKAPLSASMIKRYDEHHQDLTLLKALVRQQLP | |
| | EKYKEIFFDQSKNGYAGYIDGGASQEEFYKFIKPILEKMDGTEELLVKLNREDLLRKQRTFDNGSIPHQIHLGELHAILRRQEDFY | |
| | PFLKDNREKIEKILTFRIPYYVGPLARGNSRFAWMTRKSEETITPWNFEEVVDKGASAQSFIERMTNFDKNLPNEKVLPKHSLLYE | |
| | YFTVYNELTKVKYVTEGMRKPAFLSGEQKKAIVDLLFKTNRKVTVKQLKEDYFKKIECFDSVEISGVEDRFNASLGTYHDLLKIIK | |
| | DKDFLDNEENEDILEDIVLTLTLFEDREMIEERLKTYAHLFDDKVMKQLKRRRYTGWGRLSRKLINGIRDKQSGKTILDFLKSDGF | |
| | ANRNFMQLIHDDSLTFKEDIQKAQVSGQGDSLHEHIANLAGSPAIKKGILQTVKVVDELVKVMGRHKPENIVIEMARENQTTQKGQ | |
| | KNSRERMKRIEEGIKELGSQILKEHPVENTQLQNEKLYLYYLQNGRDMYVDQELDINRLSDYDVDHIVPQSFLKDDSIDNKVLTRS | |
| | DKNRGKSDNVPSEEVVKKMKNYWRQLLNAKLITQRKFDNLTKAERGGLSELDKAGFIKRQLVETRQITKHVAQILDSRMNTKYDEN | |
| | DKLIREVKVITLKSKLVSDFRKDFQFYKVREINNYHHAHDAYLNAVVGTALIKKYPKLESEFVYGDYKVYDVRKMIAKSEQEIGKA | |
| | TAKYFFYSNIMNFFKTEITLANGEIRKRPLIETNGETGEIVWDKGRDFATVRKVLSMPQVNIVKKTEVQTGGFSKESILPKRNSDK | |
| | LIARKKDWDPKKYGGFDSPTVAYSVLVVAKVEKGKSKKLKSVKELLGITIMERSSFEKNPIDFLEAKGYKEVKKDLIIKLPKYSLF | |
| | ELENGRKRMLASAGELQKGNELALPSKYVNFLYLASHYEKLKGSPEDNEQKQLFVEQHKHYLDEIIEQISEFSKRVILADANLDKV | |
| | LSAYNKHRDKPIREQAENIIHLFTLTNLGAPAAFKYFDTTIDRKRYTSTKEVLDATLIHQSITGLYETRIDLSQLGGDGGGSRAAK | |
| | RKAFAA | |
| Amino acid | MDKKYSIGLDIGTNSVGWAVITDEYKVPSKKFKVLGNTDRHSIKKNLIGALLFDSGETAEATRLKRTARRRYTRRKNRICYLQEIF | 396 |
| sequence for | SNEMAKVDDSFFHRLEESFLVEEDKKHERHPIFGNIVDEVAYHEKYPTIYHLRKKLVDSTDKADLRLIYLALAHMIKFRGHFLIEG | |
| Cas9 with | DLNPDNSDVDKLFIQLVQTYNQLFEENPINASGVDAKAILSARLSKSRRLENLIAQLPGEKKNGLFGNLIALSLGLTPNFKSNFDL | |
| NLS11 | AEDAKLQLSKDTYDDDLDNLLAQIGDQYADLFLAAKNLSDAILLSDILRVNTEITKAPLSASMIKRYDEHHQDLTLLKALVRQQLP | |
| | EKYKEIFFDQSKNGYAGYIDGGASQEEFYKFIKPILEKMDGTEELLVKLNREDLLRKQRTFDNGSIPHQIHLGELHAILRRQEDFY | |
| | PFLKDNREKIEKILTFRIPYYVGPLARGNSRFAWMTRKSEETITPWNFEEVVDKGASAQSFIERMTNFDKNLPNEKVLPKHSLLYE | |
| | YFTVYNELTKVKYVTEGMRKPAFLSGEQKKAIVDLLFKTNRKVTVKQLKEDYFKKIECFDSVEISGVEDRFNASLGTYHDLLKIIK | |
| | DKDFLDNEENEDILEDIVLTLTLFEDREMIEERLKTYAHLFDDKVMKQLKRRRYTGWGRLSRKLINGIRDKQSGKTILDFLKSDGF | |
| | ANRNFMQLIHDDSLTFKEDIQKAQVSGQGDSLHEHIANLAGSPAIKKGILQTVKVVDELVKVMGRHKPENIVIEMARENQTTQKGQ | |
| | KNSRERMKRIEEGIKELGSQILKEHPVENTQLQNEKLYLYYLQNGRDMYVDQELDINRLSDYDVDHIVPQSFLKDDSIDNKVLTRS | |
| | DKNRGKSDNVPSEEVVKKMKNYWRQLLNAKLITQRKFDNLTKAERGGLSELDKAGFIKRQLVETRQITKHVAQILDSRMNTKYDEN | |
| | DKLIREVKVITLKSKLVSDFRKDFQFYKVREINNYHHAHDAYLNAVVGTALIKKYPKLESEFVYGDYKVYDVRKMIAKSEQEIGKA | |
| | TAKYFFYSNIMNFFKTEITLANGEIRKRPLIETNGETGEIVWDKGRDFATVRKVLSMPQVNIVKKTEVQTGGFSKESILPKRNSDK | |
| | LIARKKDWDPKKYGGFDSPTVAYSVLVVAKVEKGKSKKLKSVKELLGITIMERSSFEKNPIDFLEAKGYKEVKKDLIIKLPKYSLF | |
| | ELENGRKRMLASAGELQKGNELALPSKYVNFLYLASHYEKLKGSPEDNEQKQLFVEQHKHYLDEIIEQISEFSKRVILADANLDKV | |
| | LSAYNKHRDKPIREQAENIIHLFTLTNLGAPAAFKYFDTTIDRKRYTSTKEVLDATLIHQSITGLYETRIDLSQLGGDGGGSRAAK | |
| | RKYFAV | |

* = PS linkage;
‘m’ = 2′-O-Me nucleotide

What is claimed is:

1. A method of treating amyloidosis associated with TTR (ATTR), comprising administering a corticosteroid and a composition to a subject in need thereof, wherein the composition comprises (i) an RNA-guided DNA binding agent or a nucleic acid encoding an RNA-guided DNA binding agent and (ii) a guide RNA comprising:
a. a guide sequence selected from SEQ ID NOs: 5-82;
b. at least 17, 18, 19, or 20 contiguous nucleotides of a sequence selected from SEQ ID NOs: 5-82; or
c. a guide sequence that is at least 99%, 98%, 97%, 96%, 95%, 94%, 93%, 92%, 91%, or 90% identical to a sequence selected from SEQ ID NOs: 5-82,
thereby treating ATTR.

2. A method of reducing TTR serum concentration, comprising administering a corticosteroid and a composition to a subject in need thereof, wherein the composition comprises (i) an RNA-guided DNA binding agent or a nucleic acid encoding an RNA-guided DNA binding agent and (ii) a guide RNA comprising:
a. a guide sequence selected from SEQ ID NOs: 5-82;
b. at least 17, 18, 19, or 20 contiguous nucleotides of a sequence selected from SEQ ID NOs: 5-82; or
c. a guide sequence that is at least 99%, 98%, 97%, 96%, 95%, 94%, 93%, 92%, 91%, or 90% identical to a sequence selected from SEQ ID NOs: 5-82,
thereby reducing TTR serum concentration.

3. A method for reducing or preventing the accumulation of amyloids or amyloid fibrils comprising TTR in a subject, comprising administering a corticosteroid and a composition to a subject in need thereof, wherein the composition comprises (i) an RNA-guided DNA binding agent or a nucleic acid encoding an RNA-guided DNA binding agent and (ii) a guide RNA comprising:
a. a guide sequence selected from SEQ ID NOs: 5-82;
b. at least 17, 18, 19, or 20 contiguous nucleotides of a sequence selected from SEQ ID NOs: 5-82; or
c. a guide sequence that is at least 99%, 98%, 97%, 96%, 95%, 94%, 93%, 92%, 91%, or 90% identical to a sequence selected from SEQ ID NOs: 5-82,
thereby reducing accumulation of amyloids or amyloid fibrils.

4. A composition comprising a guide RNA comprising:
a. a guide sequence selected from SEQ ID NOs: 5-82;
b. at least 17, 18, 19, or 20 contiguous nucleotides of a sequence selected from SEQ ID NOs: 5-82; or
c. a guide sequence that is at least 99%, 98%, 97%, 96%, 95%, 94%, 93%, 92%, 91%, or 90% identical to a sequence selected from SEQ ID NOs: 5-82,
for use in combination with a corticosteroid in a method of inducing a double-stranded break (DSB) within the TTR gene in a subject, modifying the TTR gene in a cell or subject, treating amyloidosis associated with TTR (ATTR) in a subject, reducing TTR serum concentration in a subject, and/or reducing or preventing the accumulation of amyloids or amyloid fibrils in a subject.

5. A composition comprising a vector encoding a guide RNA, wherein the guide RNA comprises:
a. a guide sequence selected from SEQ ID NOs: 5-82;
b. at least 17, 18, 19, or 20 contiguous nucleotides of a sequence selected from SEQ ID NOs: 5-82; or
c. a guide sequence that is at least 99%, 98%, 97%, 96%, 95%, 94%, 93%, 92%, 91%, or 90% identical to a sequence selected from SEQ ID NOs: 5-82,
for use in combination with a corticosteroid in a method of inducing a double-stranded break (DSB) within the TTR gene in a subject, modifying the TTR gene in a cell or subject, treating amyloidosis associated with TTR (ATTR) in a subject, reducing TTR serum concentration in a subject, and/or reducing or preventing the accumulation of amyloids or amyloid fibrils in a subject.

6. A composition comprising:
(i) a guide RNA comprising:
a. a guide sequence selected from SEQ ID NOs: 5-82;
b. at least 17, 18, 19, or 20 contiguous nucleotides of a sequence selected from SEQ ID NOs: 5-82; or
c. a guide sequence that is at least 99%, 98%, 97%, 96%, 95%, 94%, 93%, 92%, 91%, or 90% identical to a sequence selected from SEQ ID NOs: 5-82, and
(ii) an mRNA that encodes an RNA-guided DNA binding agent, wherein:
a. the open reading frame comprises a sequence with at least 95% identity to SEQ ID NO: 311;
b. the open reading frame has at least 95% identity to SEQ ID NO: 311 over at least its first 30, 50, 70, 100, 150, 200, 250, or 300 nucleotides;
c. the open reading frame consists of a set of codons of which at least 75% of the codons are codons listed in Table 1;
d. the open reading frame has an adenine content ranging from its minimum adenine content to 150% of the minimum adenine content; and/or
e. the open reading frame has an adenine dinucleotide content ranging from its minimum adenine dinucleotide content to 150% of the minimum adenine dinucleotide content;
for use in combination with a corticosteroid in a method of inducing a double-stranded break (DSB) within the TTR gene in a subject, modifying the TTR gene in a cell or subject, treating amyloidosis associated with TTR (ATTR) in a subject, reducing TTR serum concentration in a subject, and/or reducing or preventing the accumulation of amyloids or amyloid fibrils in a subject.

7. A composition comprising:
(i) a vector encoding a guide RNA, wherein the guide RNA comprises:
a. a guide sequence selected from SEQ ID NOs: 5-82;
b. at least 17, 18, 19, or 20 contiguous nucleotides of a sequence selected from SEQ ID NOs: 5-82; or
c. a guide sequence that is at least 99%, 98%, 97%, 96%, 95%, 94%, 93%, 92%, 91%, or 90% identical to a sequence selected from SEQ ID NOs: 5-82, and
(ii) an mRNA that encodes an RNA-guided DNA binding agent, wherein:
a. the open reading frame comprises a sequence with at least 95% identity to SEQ ID NO: 311;
b. the open reading frame has at least 95% identity to SEQ ID NO: 311 over at least its first 30, 50, 70, 100, 150, 200, 250, or 300 nucleotides;
c. the open reading frame consists of a set of codons of which at least 75% of the codons are codons listed in Table 1;
d. the open reading frame has an adenine content ranging from its minimum adenine content to 150% of the minimum adenine content; and/or
e. the open reading frame has an adenine dinucleotide content ranging from its minimum adenine dinucleotide content to 150% of the minimum adenine dinucleotide content;
for use in combination with a corticosteroid in a method of inducing a double-stranded break (DSB) within the TTR gene in a subject, modifying the TTR gene in a cell or subject, treating amyloidosis associated with TTR (ATTR) in a subject, reducing TTR serum concentration in a subject, and/or reducing or preventing the accumulation of amyloids or amyloid fibrils in a subject.

8. The composition for use or method of any one of claim 1-3 or 5-7, wherein the method comprises administering the composition by infusion for more than 30 minutes, e.g. more than 60 minutes or more than 120 minutes.

9. The composition or method of any one of claims 1-8, wherein the guide RNA comprises a guide sequence selected from SEQ ID NOs: 5-72, 74-78, and 80-82.

10. The composition or method of any one of the preceding claims, wherein the guide RNA comprises a guide sequence selected from SEQ ID NOs: 5, 6, 7, 8, 9, 12, 13, 14, 15, 16, 17, 22, 23, 27, 29, 30, 35, 36, 37, 38, 55, 61, 63, 65, 66, 68, or 69.

11. The composition of any one of claims 4-10, for use in inducing a double-stranded break (DSB) within the TTR gene in a cell or subject, modifying the TTR gene in a cell or subject, treating amyloidosis associated with TTR (ATTR) in a subject, or reducing TTR serum concentration in a subject, or reducing or preventing the accumulation of amyloids or amyloid fibrils in a subject.

12. The method or composition for use of any one of claims 1-11, wherein the corticosteroid is dexamethasone, betamethasone, prednisone, prednisolone, methylprednisolone, cortisone, hydrocortisone, triamcinolone, or ethamethasoneb.

13. The method or composition for use of any one of claims 1-12, wherein the corticosteroid is dexamethasone.

14. The method or composition for use of any one of claims 1-13, wherein the corticosteroid is administered before the composition.

15. The method or composition for use of any one of claims 1-14, wherein the corticosteroid is administered after the composition.

16. The method or composition for use of any one of claims 1-15, wherein the corticosteroid is administered simultaneously with the composition.

17. The method or composition for use of any one of claims 1-16, wherein the corticosteroid is administered about 5 minutes to within about 168 hours before the composition is administered.

18. The method or composition for use of any one of claims 1-17, wherein the corticosteroid is administered about 5 minutes to within about 168 hours after the composition is administered.

19. The method or composition for use of any one of claims 1-18, wherein the corticosteroid is administered 5 minutes, 10 minutes, 15 minutes, 30 minutes, 1 hour, 2 hours, 3 hours, 4 hours, 6 hours, 12 hours, 18 hours, 1 day, 1.5 days, 2 days, 3 days, 4 days, 5 days, 6 days, or one week before the composition is administered.

20. The method or composition for use of any one of claims 1-19, wherein at least two doses of the corticosteroid are administered before or after the administration of the composition.

21. The method or composition for use of any one of claims 1-20, wherein at least two doses of the corticosteroid and at least two doses of the composition are administered.

22. The method or composition for use of any one of claims 1-21, wherein the corticosteroid is administered to the subject at a dose of 0.75 mg to 20 mg, or at a dose of about 0.01-0.4 mg/kg, such as 0.1-0.35 mg/kg or 0.25-0.35 mg/kg.

23. The method or composition for use of any one of claims 1-22, wherein the corticosteroid is administered to the subject via an intravenous injection.

24. The method or composition for use of any one of claims 1-23, wherein the corticosteroid is administered to the subject orally, optionally wherein the corticosteroid is administered to the subject orally before the composition is administered to the subject by intravenous injection.

25. The method or composition for use of claim 24, wherein the corticosteroid is dexamethasone, and the dexamethasone is administered to the subject orally in the amount of 20 mg 6 to 12 hour before the composition is administered to the subject, or the dexamethasone is administered to the subject intravenously in the amount of 20 mg for 30 minutes 6 to 12 hour before the composition is administered to the subject.

26. The method or composition for use of any one of claims 1-25, wherein the composition is administered by infusion for about 60 minutes, about 90 minutes, about 120 minutes, about 150 minutes, about 180 minutes, or about 240 minutes.

27. The method or composition for use of any one of claims 1-26, wherein the corticosteroid is dexamethasone.

28. The method or composition for use of any one of claims 1-27, wherein the method further comprises administering an infusion prophylaxis, wherein the infusion prophylaxis comprises one or more of acetaminophen, an H1 blocker, or an H2 blocker, optionally wherein the one or more of the acetaminophen, H1 blocker, or H2 blocker are concurrently administered with the corticosteroid and/or before the composition.

29. The method or composition for use of claim 28, wherein each of the acetaminophen, H1 blocker, and H2 blocker are administered.

30. The method or composition for use of claim 28 or 29, wherein the H1 blocker and/or the H2 blocker are administered orally.

31. The method or composition for use of any one of claims 28-30, wherein the infusion prophylaxis comprises an intravenous corticosteroid (such as dexamethasone 8-12 mg, or 10 mg or equivalent) and acetaminophen (such as oral acetaminophen 500 mg).

32. The method or composition for use of any one of claims 28-31, wherein the infusion prophylaxis is administered as a required premedication prior to administering a guide RNA-containing composition, e.g. an LNP composition.

33. The method or composition for use of any one of claims 28-32, wherein H1 blocker is diphenhydramine.

34. The method or composition for use of any one of claims 28-33, wherein the H2 blocker is ranitidine.

35. The method or composition for use of any one of claims 1-35, wherein a first dose of the corticosteroid is administered at about 8-24 hours before the composition is administered and a second dose of the corticosteroid is administered at about 1-2 hours before the composition is administered.

36. The method or composition for use of claim 35, wherein the method further comprises administering one or more of acetaminophen, an H1 blocker, or an H2 blocker, optionally wherein the one or more of the acetaminophen, H1 blocker, or H2 blocker are concurrently administered with the second dose of the corticosteroid.

37. The method or composition for use of any one of claims 1-36, wherein a first dose of the corticosteroid is administered orally at about 8-24 hours before the composition is administered and a second dose of the corticosteroid is administered intravenously at about 1-2 hours before the composition is administered.

38. The method or composition for use of any one of claims 1-37, wherein a first dose of the corticosteroid is administered orally at about 8-24 hours before the composition is administered and a second dose of the corticosteroid is administered intravenously concurrently with administration of acetaminophen, H1 blocker and H2 blocker at about 1-2 hours before the composition is administered.

39. The method or composition for use of any one of claims 1-38, wherein the corticosteroid is dexamethasone, and a first dose of dexamethasone in the amount of about 6-10 mg is administered to the subject orally at about 8-24 hours before the composition is administered to the subject, and a second dose of dexamethasone in the amount of about 8-12 mg is intravenously administered to the subject concurrently with oral administration of acetaminophen and intravenous administration of an H1 blocker and an H2 blocker, at about 1-2 hours before the composition is administered to the subject, optionally wherein the H1 blocker is diphenhydramine and the H2 blocker is ranitidine, and/or optionally wherein the subject is human.

40. The method or composition for use of any one of claims 1-39, wherein the corticosteroid is dexamethasone, and a first dose of dexamethasone in the amount of 8 mg is administered to the subject orally at about 8-24 hours before the composition is administered to the subject, and a second dose of dexamethasone in the amount of 10 mg is intravenously administered to the subject concurrently with oral administration of acetaminophen and intravenous administration of an H1 blocker and an H2 blocker, at about 1-2 hours before the composition is administered to the subject, optionally wherein the H1 blocker is diphenhydramine and the H2 blocker is ranitidine.

41. The method or composition for use of any one of claims 1-40, wherein the composition is administered in the amount of 3 mg/kg by infusion for about 1.5-6 hours; a first dose of the corticosteroid is administered orally at about 8-24 hours before infusion of the composition; and a second dose of the corticosteroid is administered intravenously at about 1-2 hours before infusion of the composition.

42. The method or composition for use of any one of claims 1-41, wherein administering the corticosteroid improves tolerability of the composition comprising the guide RNA.

43. The method or composition for use of any one of claims 1-42, wherein administering the corticosteroid reduces the incidence or severity of one or more of inflammation, nausea, vomiting, elevated ALT concentration in blood, hyperthermia, and/or hyperalgesia in response to the composition comprising the guide RNA.

44. The method or composition for use of any one of claims 1-43, wherein administering the corticosteroid reduces or inhibits production or activity of one or more interferons and/or inflammatory cytokines in response to the composition comprising the guide RNA.

45. The method or composition for use of any one of claims 1-44, wherein the composition reduces serum TTR levels.

46. The method or composition for use of claim 45, wherein the serum TTR levels are reduced by at least 50% as compared to serum TTR levels before administration of the composition.

47. The method or composition for use of any one of claims 1-46, wherein the composition results in editing of the TTR gene.

48. The method or composition for use of claim 47, wherein the editing is calculated as a percentage of the population that is edited (percent editing), optionally wherein the percent editing is between 30 and 99% of the population.

49. The method or composition for use of claims 1-48, wherein the composition reduces amyloid deposition in at least one tissue, optionally wherein the at least one tissue comprises one or more of stomach, colon, sciatic nerve, or dorsal root ganglion.

50. The method or composition for use of claims 1-49, wherein the composition is administered or delivered at least two times.

51. The method or composition for use of claim 50, wherein the administration or delivery occurs at an interval of 1, 2, 3, 4, 5, 6, 7, 8, 9, 10, 11, 12, 13, 14, or 15 days, 1, 2, 3, 4, 5, 6, 7, 8, 9, 10, 11, 12, 13, 14, or 15 weeks, 1, 2, 3, 4, 5, 6, 7, 8, 9, 10, 11, 12, 13, 14, or 15 months.

52. The method or composition of any one of claims 1-51, wherein the guide sequence is selected from SEQ ID NOs: 5-82.

53. The method or composition of any one of claims 1-52, wherein the guide RNA is at least partially complementary to a target sequence present in the human TTR gene.

54. The method or composition of claim 53, wherein the target sequence is in exon 1, 2, 3, or 4 of the human TTR gene.

55. The method or composition of any one of claims 1-54, wherein the guide sequence is complementary to a first target sequence in the positive strand of the TTR gene, and wherein the composition further comprises a second guide sequence that is complementary to a second target sequence in the negative strand of the TTR gene.

56. The method or composition of any one of claims 1-55, wherein the guide RNA is a single guide (sgRNA).

57. The method or composition of claim 56, wherein the sgRNA comprises any one of the guide sequences of SEQ ID NOs: 5-82 and nucleotides 21-100 of SEQ ID NO: 3.

58. The method or composition of claim 56, wherein the sgRNA comprises a guide sequence that is at least 99%, 98%, 97%, 96%, 95%, 94%, 93%, 92%, 91%, or 90% identical to a sequence selected from SEQ ID Nos: 87-124.

59. The method or composition of claim 58, wherein the sgRNA comprises a sequence selected from SEQ ID Nos: 87-124.

60. The method or composition of any one of claims 1-59, wherein the guide RNA comprises at least one modification.

61. The method or composition of claim 60, wherein the at least one modification includes a 2′-O-methyl (2′-O-Me) modified nucleotide, a phosphorothioate (PS) bond between nucleotides, or a 2′-fluoro (2′-F) modified nucleotide.

62. The method or composition of any one of claims 60-61, wherein the at least one modification includes PS bonds between the first four nucleotides, PS bonds between the last four nucleotides, 2′-O-Me modified nucleotides at the first three nucleotides at the 5′ end, and/or 2′-O-Me modified nucleotides at the last three nucleotides at the 3′ end.

63. The method or composition of any one of claims 60-62, wherein the guide RNA comprises the modified nucleotides of SEQ ID NO: 3.

64. The method or composition of any one of claims 1-63, wherein the guide RNA is associated with a lipid nanoparticle (LNP).

65. The method or composition of claim 64, wherein the LNP comprises an ionizable lipid.

66. The method or composition of any one of claims 64-65, wherein the LNP comprises a biodegradable ionizable lipid.

67. The method or composition of any one of claims 64-65, wherein the LNP comprises an amine lipid, e.g., a CCD lipid.

68. The method or composition of any one of claims 64-66, wherein the LNP comprises a helper lipid.

69. The method or composition of any one of claims 64-67, wherein the LNP comprises a stealth lipid, optionally wherein:
(i) the LNP comprises a lipid component and the lipid component comprises: about 50-60 mol-% amine lipid such as Lipid A, about 8-10 mol-% neutral lipid; and about 2.5-4 mol-% stealth lipid (e.g., a PEG lipid), wherein the remainder of the lipid component is helper lipid, and wherein the N/P ratio of the LNP composition is about 6;
(ii) the LNP comprises about 50-60 mol-% amine lipid such as Lipid A; about 27-39.5 mol-% helper lipid; about 8-10 mol-% neutral lipid; and about 2.5-4 mol-% stealth lipid (e.g., a PEG lipid), wherein the N/P ratio of the LNP composition is about 5-7 (e.g., about 6);
(iii) the LNP comprises a lipid component and the lipid component comprises: about 50-60 mol-% amine lipid such as Lipid A; about 5-15 mol-% neutral lipid; and about 2.5-4 mol-% Stealth lipid (e.g., a PEG lipid), wherein the remainder of the lipid component is helper lipid, and wherein the N/P ratio of the LNP composition is about 3-10;
(iv) the LNP comprises a lipid component and the lipid component comprises: about 40-60 mol-% amine lipid such as Lipid A; about 5-15 mol-% neutral lipid; and about 2.5-4 mol-% Stealth lipid (e.g., a PEG lipid), wherein the remainder of the lipid component is helper lipid, and wherein the N/P ratio of the LNP composition is about 6;
(v) the LNP comprises a lipid component and the lipid component comprises: about 50-60 mol-% amine lipid such as Lipid A; about 5-15 mol-% neutral lipid; and about 1.5-10 mol-% Stealth lipid (e.g., a PEG lipid), wherein the remainder of the lipid component is helper lipid, and wherein the N/P ratio of the LNP composition is about 6;
(vi) the LNP comprises a lipid component and the lipid component comprises: about 40-60 mol-% amine lipid such as Lipid A; about 0-10 mol-% neutral lipid; and about 1.5-10 mol-% Stealth lipid (e.g., a PEG lipid), wherein the remainder of the lipid component is helper lipid, and wherein the N/P ratio of the LNP composition is about 3-10;
(vii) the LNP comprises a lipid component and the lipid component comprises: about 40-60 mol-% amine lipid such as Lipid A; less than about 1 mol-% neutral lipid; and about 1.5-10 mol-% Stealth lipid (e.g., a PEG lipid), wherein the remainder of the lipid component is helper lipid, and wherein the N/P ratio of the LNP composition is about 3-10;
(viii) the LNP comprises a lipid component and the lipid component comprises: about 40-60 mol-% amine lipid such as Lipid A; and about 1.5-10 mol-% Stealth lipid (e.g., a PEG lipid), wherein the remainder of the lipid component is helper lipid, wherein the N/P ratio of the LNP composition is about 3-10, and wherein the LNP composition is essentially free of or free of neutral phospholipid; or
(ix) the LNP comprises a lipid component and the lipid component comprises: about 50-60 mol-% amine lipid such as Lipid A; about 8-10 mol-% neutral lipid; and about 2.5-4 mol-% Stealth lipid (e.g., a PEG lipid), wherein the remainder of the lipid component is helper lipid, and wherein the N/P ratio of the LNP composition is about 3-7.

70. The method or composition of any one of claims 64-69, wherein the LNP comprises a neutral lipid.

71. The method or composition of any one of claims 64-70, wherein the LNP comprises a lipid component and the lipid component comprises: about 50 mol-% amine lipid such as Lipid A; about 9 mol-% neutral lipid such as DSPC; about 3 mol-% of stealth lipid such as a PEG lipid, such as PEG2k-DMG, and the remainder of the lipid component is helper lipid such as cholesterol wherein the N/P ratio of the LNP composition is about 6.

72. The method or composition of any one of claims 64-71, wherein the LNP comprises a lipid component and the lipid component comprises: about 50 mol-% Lipid A; about 9 mol-% DSPC; about 3 mol-% of PEG2k-DMG, and the remainder of the lipid component is cholesterol wherein the N/P ratio of the LNP composition is about 6.

73. The method or composition of any one of claims 1-72, wherein the composition further comprises an RNA-guided DNA binding agent.

74. The method or composition of any one of claims 1-72, wherein the composition further comprises a polynucleotide that encodes an RNA-guided DNA binding agent.

75. The method or composition of claim 74, wherein the polynucleotide is an mRNA.

76. The method or composition of any one of claims 73-75, wherein the RNA-guided DNA binding agent is a Cas cleavase.

77. The method or composition of any one of claims 74-76, wherein the polynucleotide comprises an open reading frame encoding an RNA-guided DNA binding agent, wherein:
a. the open reading frame comprises a sequence with at least 95% identity to SEQ ID NO: 311;
b. the open reading frame has at least 95% identity to SEQ ID NO: 311 over at least its first 30, 50, 70, 100, 150, 200, 250, or 300 nucleotides;
c. the open reading frame consists of a set of codons of which at least 75% of the codons are codons listed in Table 4;
d. the open reading frame has an adenine content ranging from its minimum adenine content to 150% of the minimum adenine content; and/or
e. the open reading frame has an adenine dinucleotide content ranging from its minimum adenine dinucleotide content to 150% of the minimum adenine dinucleotide content.

78. The composition or method of any one of claims 74-77, wherein the polynucleotide comprises a 5′ UTR with at least 90% identity to any one of SEQ ID NOs: 232, 234, 236, 238, 241, or 275-277; and/or a 3′ UTR with at least 90% identity to any one of SEQ ID NOs: 233, 235, 237, 239, or 240.

79. The composition or method of any of claims 74-78, wherein the polynucleotide is an mRNA and at least 10% of the uridine in the mRNA is substituted with a modified uridine.

80. The method or composition of any one of claims 73-79, wherein the RNA-guided DNA binding agent is modified.

81. The method or composition of claim 80, wherein the modified RNA-guided DNA binding agent comprises a nuclear localization signal (NLS).

82. The method or composition of any one of claims 1-81, wherein the composition is a pharmaceutical formulation and further comprises a pharmaceutically acceptable carrier.

83. The method or composition for use of any one of claims 1-82, wherein the composition reduces or prevents amyloids or amyloid fibrils comprising TTR.

84. The method or composition for use of any one of claims 1-83, wherein non-homologous ending joining (NHEJ) leads to a mutation during repair of a DSB in the TTR gene.

85. The method or composition of any one of claims 1-84, wherein the sequence of the guide RNA is:
a) SEQ ID NO: 92 or 104;
b) SEQ ID NO: 87, 89, 96, or 113;
c) SEQ ID NO: 100, 102, 106, 111, or 112; or
d) SEQ ID NO: 88, 90, 91, 93, 94, 95, 97, 101, 103, 108, or 109,
optionally wherein the guide RNA does not produce indels at off-target site(s) that occur in a protein coding region in the genome of primary human hepatocytes.

86. The method or composition for use of any one of claims 1-85, wherein administering the composition reduces levels of TTR in the subject, optionally wherein the levels of TTR are reduced by at least 50%.

87. The method or composition for use of claim 86, wherein the levels of TTR are measured in serum, plasma, blood, cerebral spinal fluid, or sputum, or liver, choroid plexus, and/or retina, optionally wherein the levels of TTR are measured via enzyme-linked immunosorbent assay (ELISA).

88. The method or composition for use of claims 1-87, wherein the subject has ATTR, familial amyloid polyneuropathy or familial amyloid cardiomyopathy.

89. The method or composition for use of claims 1-88, wherein the subject is human.

90. The method or composition for use of claims 1-89, wherein the subject is tested for specific mutations in the TTR gene before administering the composition or formulation.

91. Use of a composition or formulation of any of claims 1-90 for the preparation of a medicament for treating a human subject having ATTR.

The application's sequence listing, which the Patent Office published only in electronic form, follows.

SEQUENCE LISTING (396 sequences)

SEQ ID NO: 1 - DNA, 4411 bp, Artificial Sequence
  Synthetic: Cas9 transcript with 5 UTR of HSD, ORF corresponding to SEQ ID NO: 204, Kozak sequence, and 3 UTR of ALB
gggtcccgcagtcggcgtccagcggctctgcttgttcgtgtgtgtgtcgttgcaggccttattcggatccgccaccatggacaagaagtacagcatcggactggacatcggaacaaacagcgtcggatgggcagtcatcacagacgaatacaaggtcccgagcaagaagttcaaggtcctgggaaacacagacagacacagcatcaagaagaacctgatcggagcactgctgttcgacagcggagaaacagcagaagcaacaagactgaagagaacagcaagaagaagatacacaagaagaaagaacagaatctgctacctgcaggaaatcttcagcaacgaaatggcaaaggtcgacgacagcttcttccacagactggaagaaagcttcctggtcgaagaagacaagaagcacgaaagacacccgatcttcggaaacatcgtcgacgaagtcgcataccacgaaaagtacccgacaatctaccacctgagaaagaagctggtcgacagcacagacaaggcagacctgagactgatctacctggcactggcacacatgatcaagttcagaggacacttcctgatcgaaggagacctgaacccggacaacagcgacgtcgacaagctgttcatccagctggtccagacatacaaccagctgttcgaagaaaacccgatcaacgcaagcggagtcgacgcaaaggcaatcctgagcgcaagactgagcaagagcagaagactggaaaacctgatcgcacagctgccgggagaaaagaagaacggactgttcggaaacctgatcgcactgagcctgggactgacaccgaacttcaagagcaacttcgacctggcagaagacgcaaagctgcagctgagcaaggacacatacgacgacgacctggacaacctgctggcacagatcggagaccagtacgcagacctgttcctggcagcaaagaacctgagcgacgcaatcctgctgagcgacatcctgagagtcaacacagaaatcacaaaggcaccgctgagcgcaagcatgatcaagagatacgacgaacaccaccaggacctgacactgctgaaggcactggtcagacagcagctgccggaaaagtacaaggaaatcttcttcgaccagagcaagaacggatacgcaggatacatcgacggaggagcaagccaggaagaattctacaagttcatcaagccgatcctggaaaagatggacggaacagaagaactgctggtcaagctgaacagagaagacctgctgagaaagcagagaacattcgacaacggaagcatcccgcaccagatccacctgggagaactgcacgcaatcctgagaagacaggaagacttctacccgttcctgaaggacaacagagaaaagatcgaaaagatcctgacattcagaatcccgtactacgtcggaccgctggcaagaggaaacagcagattcgcatggatgacaagaaagagcgaagaaacaatcacaccgtggaacttcgaagaagtcgtcgacaagggagcaagcgcacagagcttcatcgaaagaatgacaaacttcgacaagaacctgccgaacgaaaaggtcctgccgaagcacagcctgctgtacgaatacttcacagtctacaacgaactgacaaaggtcaagtacgtcacagaaggaatgagaaagccggcattcctgagcggagaacagaagaaggcaatcgtcgacctgctgttcaagacaaacagaaaggtcacagtcaagcagctgaaggaagactacttcaagaagatcgaatgcttcgacagcgtcgaaatcagcggagtcgaagacagattcaacgcaagcctgggaacataccacgacctgctgaagatcatcaaggacaaggacttcctggacaacgaagaaaacgaagacatcctggaagacatcgtcctgacactgacactgttcgaagacagagaaatgatcgaagaaagactgaagacatacgcacacctgttcgacgacaaggtcatgaagcagctgaagagaagaagatacacaggatggggaagactgagcagaaagctgatcaacggaatcagagacaagcagagcggaaagacaatcctggacttcctgaagagcgacggattcgcaaacagaaacttcatgcagctgatccacgacgacagcctgacattcaaggaagacatccagaaggcacaggtcagcggacagggagacagcctgcacgaacacatcgcaaacctggcaggaagcccggcaatcaagaagggaatcctgcagacagtcaaggtcgtcgacgaactggtcaaggtcatgggaagacacaagccggaaaacatcgtcatcgaaatggcaagagaaaaccagacaacacagaagggacagaagaacagcagagaaagaatgaagagaatcgaagaaggaatcaaggaactgggaagccagatcctgaaggaacacccggtcgaaaacacacagctgcagaacgaaaagctgtacctgtactacctgcagaacggaagagacatgtacgtcgaccaggaactggacatcaacagactgagcgactacgacgtcgaccacatcgtcccgcagagcttcctgaaggacgacagcatcgacaacaaggtcctgacaagaagcgacaagaacagaggaaagagcgacaacgtcccgagcgaagaagtcgtcaagaagatgaagaactactggagacagctgctgaacgcaaagctgatcacacagagaaagttcgacaacctgacaaaggcagagagaggaggactgagcgaactggacaaggcaggattcatcaagagacagctggtcgaaacaagacagatcacaaagcacgtcgcacagatcctggacagcagaatgaacacaaagtacgacgaaaacgacaagctgatcagagaagtcaaggtcatcacactgaagagcaagctggtcagcgacttcagaaaggacttccagttctacaaggtcagagaaatcaacaactaccaccacgcacacgacgcatacctgaacgcagtcgtcggaacagcactgatcaagaagtacccgaagctggaaagcgaattcgtctacggagactacaaggtctacgacgtcagaaagatgatcgcaaagagcgaacaggaaatcggaaaggcaacagcaaagtacttcttctacagcaacatcatgaacttcttcaagacagaaatcacactggcaaacggagaaatcagaaagagaccgctgatcgaaacaaacggagaaacaggagaaatcgtctgggacaagggaagagacttcgcaacagtcagaaaggtcctgagcatgccgcaggtcaacatcgtcaagaagacagaagtccagacaggaggattcagcaaggaaagcatcctgccgaagagaaacagcgacaagctgatcgcaagaaagaaggactgggacccgaagaagtacggaggattcgacagcccgacagtcgcatacagcgtcctggtcgtcgcaaaggtcgaaaagggaaagagcaagaagctgaagagcgtcaaggaactgctgggaatcacaatcatggaaagaagcagcttcgaaaagaacccgatcgacttcctggaagcaaagggatacaaggaagtcaagaaggacctgatcatcaagctgccgaagtacagcctgttcgaactggaaaacggaagaaagagaatgctggcaagcgcaggagaactgcagaagggaaacgaactggcactgccgagcaagtacgtcaacttcctgtacctggcaagccactacgaaaagctgaagggaagcccggaagacaacgaacagaagcagctgttcgtcgaacagcacaagcactacctggacgaaatcatcgaacagatcagcgaattcagcaagagagtcatcctggcagacgcaaacctggacaaggtcctgagcgcatacaacaagcacagagacaagccgatcagagaacaggcagaaaacatcatccacctgttcacactgacaaacctgggagcaccggcagcattcaagtacttcgacacaacaatcgacagaaagagatacacaagcacaaaggaagtcctggacgcaacactgatccaccagagcatcacaggactgtacgaaacaagaatcgacctgagccagctgggaggagacggaggaggaagcccgaagaagaagagaaaggtctagctagccatcacatttaaaagcatctcagcctaccatgagaataagagaaagaaaatgaagatcaatagcttattcatctctttttctttttcgttggtgtaaagccaacaccctgtctaaaaaacataaatttctttaatcattttgcctcttttctctgtgcttcaattaataaaaaatggaaagaacctcgag

SEQ ID NO: 2 - DNA, 4403 bp, Artificial Sequence
  Synthetic: Cas9 transcript comprising Cas9 ORF corresponding to SEQ ID NO: 205 using codons with generally high expression in humans
gggtcccgcagtcggcgtccagcggctctgcttgttcgtgtgtgtgtcgttgcaggccttattcggatccatgcctaagaaaaagcggaaggtcgacggggataagaagtactcaatcgggctggatatcggaactaattccgtgggttgggcagtgatcacggatgaatacaaagtgccgtccaagaagttcaaggtcctggggaacaccgatagacacagcatcaagaaaaatctcatcggagccctgctgtttgactccggcgaaaccgcagaagcgacccggctcaaacgtaccgcgaggcgacgctacacccggcggaagaatcgcatctgctatctgcaagagatcttttcgaacgaaatggcaaaggtcgacgacagcttcttccaccgcctggaagaatctttcctggtggaggaggacaagaagcatgaacggcatcctatctttggaaacatcgtcgacgaagtggcgtaccacgaaaagtacccgaccatctaccatctgcggaagaagttggttgactcaactgacaaggccgacctcagattgatctacttggccctcgcccatatgatcaaattccgcggacacttcctgatcgaaggcgatctgaaccctgataactccgacgtggataagcttttcattcaactggtgcagacctacaaccaactgttcgaagaaaacccaatcaatgctagcggcgtcgatgccaaggccatcctgtccgcccggctgtcgaagtcgcggcgcctcgaaaacctgatcgcacagctgccgggagagaaaaagaacggacttttcggcaacttgatcgctctctcactgggactcactcccaatttcaagtccaattttgacctggccgaggacgcgaagctgcaactctcaaaggacacctacgacgacgacttggacaatttgctggcacaaattggcgatcagtacgcggatctgttccttgccgctaagaacctttcggacgcaatcttgctgtccgatatcctgcgcgtgaacaccgaaataaccaaagcgccgcttagcgcctcgatgattaagcggtacgacgagcatcaccaggatctcacgctgctcaaagcgctcgtgagacagcaactgcctgaaaagtacaaggagatcttcttcgaccagtccaagaatgggtacgcagggtacatcgatggaggcgctagccaggaagagttctataagttcatcaagccaatcctggaaaagatggacggaaccgaagaactgctggtcaagctgaacagggaggatctgctccggaaacagagaacctttgacaacggatccattccccaccagatccatctgggtgagctgcacgccatcttgcggcgccaggaggacttttacccattcctcaaggacaaccgggaaaagatcgagaaaattctgacgttccgcatcccgtattacgtgggcccactggcgcgcggcaattcgcgcttcgcgtggatgactagaaaatcagaggaaaccatcactccttggaatttcgaggaagttgtggataagggagcttcggcacaaagcttcatcgaacgaatgaccaacttcgacaagaatctcccaaacgagaaggtgcttcctaagcacagcctcctttacgaatacttcactgtctacaacgaactgactaaagtgaaatacgttactgaaggaatgaggaagccggcctttctgtccggagaacagaagaaagcaattgtcgatctgctgttcaagaccaaccgcaaggtgaccgtcaagcagcttaaagaggactacttcaagaagatcgagtgtttcgactcagtggaaatcagcggggtggaggacagattcaacgcttcgctgggaacctatcatgatctcctgaagatcatcaaggacaaggacttccttgacaacgaggagaacgaggacatcctggaagatatcgtcctgaccttgacccttttcgaggatcgcgagatgatcgaggagaggcttaagacctacgctcatctcttcgacgataaggtcatgaaacaactcaagcgccgccggtacactggttggggccgcctctcccgcaagctgatcaacggtattcgcgataaacagagcggtaaaactatcctggatttcctcaaatcggatggcttcgctaatcgtaacttcatgcaattgatccacgacgacagcctgacctttaaggaggacatccaaaaagcacaagtgtccggacagggagactcactccatgaacacatcgcgaatctggccggttcgccggcgattaagaagggaattctgcaaactgtgaaggtggtcgacgagctggtgaaggtcatgggacggcacaaaccggagaatatcgtgattgaaatggcccgagaaaaccagactacccagaagggccagaaaaactcccgcgaaaggatgaagcggatcgaagaaggaatcaaggagctgggcagccagatcctgaaagagcacccggtggaaaacacgcagctgcagaacgagaagctctacctgtactatttgcaaaatggacgggacatgtacgtggaccaagagctggacatcaatcggttgtctgattacgacgtggaccacatcgttccacagtcctttctgaaggatgactcgatcgataacaaggtgttgactcgcagcgacaagaacagagggaagtcagataatgtgccatcggaggaggtcgtgaagaagatgaagaattactggcggcagctcctgaatgcgaagctgattacccagagaaagtttgacaatctcactaaagccgagcgcggcggactctcagagctggataaggctggattcatcaaacggcagctggtcgagactcggcagattaccaagcacgtggcgcagatcttggactcccgcatgaacactaaatacgacgagaacgataagctcatccgggaagtgaaggtgattaccctgaaaagcaaacttgtgtcggactttcggaaggactttcagttttacaaagtgagagaaatcaacaactaccatcacgcgcatgacgcatacctcaacgctgtggtcggtaccgccctgatcaaaaagtaccctaaacttgaatcggagtttgtgtacggagactacaaggtctacgacgtgaggaagatgatagccaagtccgaacaggaaatcgggaaagcaactgcgaaatacttcttttactcaaacatcatgaactttttcaagactgaaattacgctggccaatggagaaatcaggaagaggccactgatcgaaactaacggagaaacgggcgaaatcgtgtgggacaagggcagggacttcgcaactgttcgcaaagtgctctctatgccgcaagtcaatattgtgaagaaaaccgaagtgcaaaccggcggattttcaaaggaatcgatcctcccaaagagaaatagcgacaagctcattgcacgcaagaaagactgggacccgaagaagtacggaggattcgattcgccgactgtcgcatactccgtcctcgtggtggccaaggtggagaagggaaagagcaaaaagctcaaatccgtcaaagagctgctggggattaccatcatggaacgatcctcgttcgagaagaacccgattgatttcctcgaggcgaagggttacaaggaggtgaagaaggatctgatcatcaaactccccaagtactcactgttcgaactggaaaatggtcggaagcgcatgctggcttcggccggagaactccaaaaaggaaatgagctggccttgcctagcaagtacgtcaacttcctctatcttgcttcgcactacgaaaaactcaaagggtcaccggaagataacgaacagaagcagcttttcgtggagcagcacaagcattatctggatgaaatcatcgaacaaatctccgagttttcaaagcgcgtgatcctcgccgacgccaacctcgacaaagtcctgtcggcctacaataagcatagagataagccgatcagagaacaggccgagaacattatccacttgttcaccctgactaacctgggagccccagccgccttcaagtacttcgatactactatcgatcgcaaaagatacacgtccaccaaggaagttctggacgcgaccctgatccaccaaagcatcactggactctacgaaactaggatcgatctgtcgcagctgggtggcgattgatagtctagccatcacatttaaaagcatctcagcctaccatgagaataagagaaagaaaatgaagatcaatagcttattcatctctttttctttttcgttggtgtaaagccaacaccctgtctaaaaaacataaatttctttaatcattttgcctcttttctctgtgcttcaattaataaaaaatggaaagaacctcgag

SEQ ID NO: 3 - RNA, 100 nt, Artificial Sequence
  Synthetic: modified sgRNA sequence (N may be any natural or non-natural nucleotide)
  modified_base (1)..(3): 2'-O-Me nucleotide
  modified_base (1)..(4): PS linkage
  misc_feature (1)..(20): n is a, c, g, or u
  modified_base (29)..(40): 2'-O-Me nucleotide
  modified_base (69)..(100): 2'-O-Me nucleotide
  modified_base (97)..(100): PS linkage
nnnnnnnnnnnnnnnnnnnnguuuuagagcuagaaauagcaaguuaaaauaaggcuaguccguuaucaacuugaaaaaguggcaccgagucggugcuuuu

SEQ ID NO: 4 - RNA, 105 nt, Artificial Sequence
  Synthetic: 30/30/39 poly-A sequence
aaaaaaaaaaaaaaaaaaaaaaaaaaaaaagcgaaaaaaaaaaaaaaaaaaaaaaaaaaaaaaccgaaaaaaaaaaaaaaaaaaaaaaaaaaaaaaaaaaaaaaa

SEQ ID NO: 5 - RNA, 20 nt, Artificial Sequence
  Synthetic: CR003335 gRNA targeting Human TTR (Exon 1)
cugcuccuccucugccuugc

SEQ ID NO: 6 - RNA, 20 nt, Artificial Sequence
  Synthetic: CR003336 gRNA targeting Human TTR (Exon 1)
ccuccucugccuugcuggac

SEQ ID NO: 7 - RNA, 20 nt, Artificial Sequence
  Synthetic: CR003337 gRNA targeting Human TTR (Exon 1)
ccaguccagcaaggcagagg

SEQ ID NO: 8 - RNA, 20 nt, Artificial Sequence
  Synthetic: CR003338 gRNA targeting Human TTR (Exon 1)
auaccaguccagcaaggcag

SEQ ID NO: 9 - RNA, 20 nt, Artificial Sequence
  Synthetic: CR003339 gRNA targeting Human TTR (Exon 1)
acacaaauaccaguccagca

SEQ ID NO: 10 - RNA, 20 nt, Artificial Sequence
  Synthetic: CR003340 gRNA targeting Human TTR (Exon 1)
uggacugguauuugugucug

SEQ ID NO: 11 - RNA, 20 nt, Artificial Sequence
  Synthetic: CR003341 gRNA targeting Human TTR (Exon 1)
cugguauuugugucugaggc

SEQ ID NO: 12 - RNA, 20 nt, Artificial Sequence
  Synthetic: CR003342 gRNA targeting Human TTR (Exon 2)
cuucucuacacccagggcac

SEQ ID NO: 13 - RNA, 20 nt, Artificial Sequence
  Synthetic: CR003343 gRNA targeting Human TTR (Exon 2)
cagaggacacuuggauucac

SEQ ID NO: 14 - RNA, 20 nt, Artificial Sequence
  Synthetic: CR003344 gRNA targeting Human TTR (Exon 2)
uuugaccaucagaggacacu

SEQ ID NO: 15 - RNA, 20 nt, Artificial Sequence
  Synthetic: CR003345 gRNA targeting Human TTR (Exon 2)
ucuagaacuuugaccaucag

SEQ ID NO: 16 - RNA, 20 nt, Artificial Sequence
  Synthetic: CR003346 gRNA targeting Human TTR (Exon 2)
aaaguucuagaugcuguccg

SEQ ID NO: 17 - RNA, 20 nt, Artificial Sequence
  Synthetic: CR003347 gRNA targeting Human TTR (Exon 2)
cauugauggcaggacugccu

SEQ ID NO: 18 - RNA, 20 nt, Artificial Sequence
  Synthetic: CR003348 gRNA targeting Human TTR (Exon 2)
aggcaguccugccaucaaug

SEQ ID NO: 19 - RNA, 20 nt, Artificial Sequence
  Synthetic: CR003349 gRNA targeting Human TTR (Exon 2)
ugcacggccacauugauggc

SEQ ID NO: 20 - RNA, 20 nt, Artificial Sequence
  Synthetic: CR003350 gRNA targeting Human TTR (Exon 2)
cacaugcacggccacauuga

SEQ ID NO: 21 - RNA, 20 nt, Artificial Sequence
  Synthetic: CR003351 gRNA targeting Human TTR (Exon 2)
agccuuucugaacacaugca

SEQ ID NO: 22 - RNA, 20 nt, Artificial Sequence
  Synthetic: CR003352 gRNA targeting Human TTR (Exon 2)
gaaaggcugcugaugacacc

SEQ ID NO: 23 - RNA, 20 nt, Artificial Sequence
  Synthetic: CR003353 gRNA targeting Human TTR (Exon 2)
aaaggcugcugaugacaccu

SEQ ID NO: 24 - RNA, 20 nt, Artificial Sequence
  Synthetic: CR003354 gRNA targeting Human TTR (Exon 2)
accugggagccauuugccuc

SEQ ID NO: 25 - RNA, 20 nt, Artificial Sequence
  Synthetic: CR003355 gRNA targeting Human TTR (Exon 2)
cccagaggcaaauggcuccc

SEQ ID NO: 26 - RNA, 20 nt, Artificial Sequence
  Synthetic: CR003356 gRNA targeting Human TTR (Exon 2)
gcaacuuacccagaggcaaa

SEQ ID NO: 27 - RNA, 20 nt, Artificial Sequence
  Synthetic: CR003357 gRNA targeting Human TTR (Exon 2)
uucuuuggcaacuuacccag

SEQ ID NO: 28 - RNA, 20 nt, Artificial Sequence
  Synthetic: CR003358 gRNA targeting Human TTR (Exon 3)
augcagcucuccagacucac

SEQ ID NO: 29 - RNA, 20 nt, Artificial Sequence
  Synthetic: CR003359 gRNA targeting Human TTR (Exon 3)
agugagucuggagagcugca

SEQ ID NO: 30 - RNA, 20 nt, Artificial Sequence
  Synthetic: CR003360 gRNA targeting Human TTR (Exon 3)
gugagucuggagagcugcau

SEQ ID NO: 31 - RNA, 20 nt, Artificial Sequence
  Synthetic: CR003361 gRNA targeting Human TTR (Exon 3)
gcugcaugggcucacaacug

SEQ ID NO: 32 - RNA, 20 nt, Artificial Sequence
  Synthetic: CR003362 gRNA targeting Human TTR (Exon 3)
gcaugggcucacaacugagg

SEQ ID NO: 33 - RNA, 20 nt, Artificial Sequence
  Synthetic: CR003363 gRNA targeting Human TTR (Exon 3)
acugaggaggaauuuguaga

SEQ ID NO: 34 - RNA, 20 nt, Artificial Sequence
  Synthetic: CR003364 gRNA targeting Human TTR (Exon 3)
cugaggaggaauuuguagaa

SEQ ID NO: 35 - RNA, 20 nt, Artificial Sequence
  Synthetic: CR003365 gRNA targeting Human TTR (Exon 3)
uguagaagggauauacaaag

SEQ ID NO: 36 - RNA, 20 nt, Artificial Sequence
  Synthetic: CR003366 gRNA targeting Human TTR (Exon 3)
aaauagacaccaaaucuuac

SEQ ID NO: 37 - RNA, 20 nt, Artificial Sequence
  Synthetic: CR003367 gRNA targeting Human TTR (Exon 3)
agacaccaaaucuuacugga

SEQ ID NO: 38 - RNA, 20 nt, Artificial Sequence
  Synthetic: CR003368 gRNA targeting Human TTR (Exon 3)
aagugccuuccaguaagauu

SEQ ID NO: 39 - RNA, 20 nt, Artificial Sequence
  Synthetic: CR003369 gRNA targeting Human TTR (Exon 3)
cucugcaugcucauggaaug

SEQ ID NO: 40 - RNA, 20 nt, Artificial Sequence
  Synthetic: CR003370 gRNA targeting Human TTR (Exon 3)
ccucugcaugcucauggaau

SEQ ID NO: 41 - RNA, 20 nt, Artificial Sequence
  Synthetic: CR003371 gRNA targeting Human TTR (Exon 3)
accucugcaugcucauggaa

SEQ ID NO: 42 - RNA, 20 nt, Artificial Sequence
  Synthetic: CR003372 gRNA targeting Human TTR (Exon 3)
uacucaccucugcaugcuca

SEQ ID NO: 43 - RNA, 20 nt, Artificial Sequence
  Synthetic: CR003373 gRNA targeting Human TTR (Exon 4)
guauucacagccaacgacuc

SEQ ID NO: 44 - RNA, 20 nt, Artificial Sequence
  Synthetic: CR003374 gRNA targeting Human TTR (Exon 4)
gcggcgggggccggagucgu

SEQ ID NO: 45 - RNA, 20 nt, Artificial Sequence
  Synthetic: CR003375 gRNA targeting Human TTR (Exon 4)
aaugguguagcggcgggggc

SEQ ID NO: 46 - RNA, 20 nt, Artificial Sequence
  Synthetic: CR003376 gRNA targeting Human TTR (Exon 4)
cggcaaugguguagcggcgg

SEQ ID NO: 47 - RNA, 20 nt, Artificial Sequence
  Synthetic: CR003377 gRNA targeting Human TTR (Exon 4)
gcggcaaugguguagcggcg

SEQ ID NO: 48 - RNA, 20 nt, Artificial Sequence
  Synthetic: CR003378 gRNA targeting Human TTR (Exon 4)
ggcggcaaugguguagcggc

SEQ ID NO: 49 - RNA, 20 nt, Artificial Sequence
  Synthetic: CR003379 gRNA targeting Human TTR (Exon 4)
gggcggcaaugguguagcgg

SEQ ID NO: 50 - RNA, 20 nt, Artificial Sequence
  Synthetic: CR003380 gRNA targeting Human TTR (Exon 4)
gcagggcggcaaugguguag

SEQ ID NO: 51 - RNA, 20 nt, Artificial Sequence
  Synthetic: CR003381 gRNA targeting Human TTR (Exon 4)
ggggcucagcagggcggcaa

SEQ ID NO: 52 - RNA, 20 nt, Artificial Sequence
  Synthetic: CR003382 gRNA targeting Human TTR (Exon 4)
ggaguaggggcucagcaggg

SEQ ID NO: 53 - RNA, 20 nt, Artificial Sequence
  Synthetic: CR003383 gRNA targeting Human TTR (Exon 4)
auaggaguaggggcucagca

SEQ ID NO: 54 - RNA, 20 nt, Artificial Sequence
  Synthetic: CR003384 gRNA targeting Human TTR (Exon 4)
aauaggaguaggggcucagc

SEQ ID NO: 55 - RNA, 20 nt, Artificial Sequence
  Synthetic: CR003385 gRNA targeting Human TTR (Exon 4)
ccccuacuccuauuccacca

SEQ ID NO: 56 - RNA, 20 nt, Artificial Sequence
  Synthetic: CR003386 gRNA targeting Human TTR (Exon 4)
ccgugguggaauaggaguag

SEQ ID NO: 57 - RNA, 20 nt, Artificial Sequence
  Synthetic: CR003387 gRNA targeting Human TTR (Exon 4)
gccgugguggaauaggagua

SEQ ID NO: 58 - RNA, 20 nt, Artificial Sequence
  Synthetic: CR003388 gRNA targeting Human TTR (Exon 4)
gacgacagccgugguggaau

SEQ ID NO: 59 - RNA, 20 nt, Artificial Sequence
  Synthetic: CR003389 gRNA targeting Human TTR (Exon 4)
auuggugacgacagccgugg

SEQ ID NO: 60 - RNA, 20 nt, Artificial Sequence
  Synthetic: CR003390 gRNA targeting Human TTR (Exon 4)
gggauuggugacgacagccg

SEQ ID NO: 61 - RNA, 20 nt, Artificial Sequence
  Synthetic: CR003391 gRNA targeting Human TTR (Exon 4)
ggcugucgucaccaauccca

SEQ ID NO: 62 - RNA, 20 nt, Artificial Sequence
  Synthetic: CR003392 gRNA targeting Human TTR (Exon 4)
agucccucauuccuugggau

SEQ ID NO: 63 - RNA, 20 nt, Artificial Sequence
  Synthetic: CR005298 gRNA targeting Human TTR (Exon 1)
uccacucauucuuggcagga

SEQ ID NO: 64 - RNA, 20 nt, Artificial Sequence
  Synthetic: CR005299 gRNA targeting Human TTR (Exon 4)
agccgugguggaauaggagu

SEQ ID NO: 65 - RNA, 20 nt, Artificial Sequence
  Synthetic: CR005300 gRNA targeting Human TTR (Exon 1)
ucacagaaacacucaccgua

SEQ ID NO: 66 - RNA, 20 nt, Artificial Sequence
  Synthetic: CR005301 gRNA targeting Human TTR (Exon 1)
gucacagaaacacucaccgu

SEQ ID NO: 67 - RNA, 20 nt, Artificial Sequence
  Synthetic: CR005302 gRNA targeting Human TTR (Exon 2)
acgugucuucucuacaccca

SEQ ID NO: 68 - RNA, 20 nt, Artificial Sequence
  Synthetic: CR005303 gRNA targeting Human TTR (Exon 2)
ugaauccaaguguccucuga

SEQ ID NO: 69 - RNA, 20 nt, Artificial Sequence
  Synthetic: CR005304 gRNA targeting Human TTR (Exon 2)
ggccgugcauguguucagaa

SEQ ID NO: 70 - RNA, 20 nt, Artificial Sequence
  Synthetic: CR005305 gRNA targeting Human TTR (Exon 3)
uauaggaaaaccagugaguc

SEQ ID NO: 71 - RNA, 20 nt, Artificial Sequence
  Synthetic: CR005306 gRNA targeting Human TTR (Exon 3)
aaaucuuacuggaaggcacu

SEQ ID NO: 72 - RNA, 20 nt, Artificial Sequence
  Synthetic: CR005307 gRNA targeting Human TTR (Exon 4)
ugucugucuucucucauagg

SEQ ID NO: 73 - RNA, 20 nt, Artificial Sequence
  Synthetic: CR000689 gRNA targeting Cyno TTR
acacaaauaccaguccagcg

SEQ ID NO: 74 - RNA, 20 nt, Artificial Sequence
  Synthetic: CR005364 gRNA targeting Cyno TTR
aaaggcugcugaugagaccu

SEQ ID NO: 75 - RNA, 20 nt, Artificial Sequence
  Synthetic: CR005365 gRNA targeting Cyno TTR
cauugacagcaggacugccu

SEQ ID NO: 76 - RNA, 20 nt, Artificial Sequence
  Synthetic: CR005366 gRNA targeting Cyno TTR
auaccaguccagcgaggcag

SEQ ID NO: 77 - RNA, 20 nt, Artificial Sequence
  Synthetic: CR005367 gRNA targeting Cyno TTR
ccaguccagcgaggcagagg

SEQ ID NO: 78 - RNA, 20 nt, Artificial Sequence
  Synthetic: CR005368 gRNA targeting Cyno TTR
ccuccucugccucgcuggac

SEQ ID NO: 79 - RNA, 20 nt, Artificial Sequence
  Synthetic: CR005369 gRNA targeting Cyno TTR
aaaguucuagaugccguccg

SEQ ID NO: 80 - RNA, 20 nt, Artificial Sequence
  Synthetic: CR005370 gRNA targeting Cyno TTR
acuugucuucucuauaccca

SEQ ID NO: 81 - RNA, 20 nt, Artificial Sequence
  Synthetic: CR005371 gRNA targeting Cyno TTR
aagugacuuccaguaagauu

SEQ ID NO: 82 - RNA, 20 nt, Artificial Sequence
  Synthetic: CR005372 gRNA targeting Cyno TTR
aaaaggcugcugaugagacc

SEQ ID NO: 83-86 - skipped (4 entries)

SEQ ID NO: 87 - RNA, 100 nt, Artificial Sequence
  Synthetic: G000480 sgRNA modified sequence targeting Human TTR
  modified_base (1)..(3): 2'-O-Me nucleotide
  modified_base (1)..(4): PS linkage
  modified_base (29)..(40): 2'-O-Me nucleotide
  modified_base (69)..(100): 2'-O-Me nucleotide
  modified_base (97)..(100): PS linkage
aaaggcugcugaugacaccuguuuuagagcuagaaauagcaaguuaaaauaaggcuaguccguuaucaacuugaaaaaguggcaccgagucggugcuuuu

SEQ ID NO: 88 - RNA, 100 nt, Artificial Sequence
  Synthetic: G000481 sgRNA modified sequence targeting Human TTR
  modified_base (1)..(3): 2'-O-Me nucleotide
  modified_base (1)..(4): PS linkage
  modified_base (29)..(40): 2'-O-Me nucleotide
  modified_base (69)..(100): 2'-O-Me nucleotide
  modified_base (97)..(100): PS linkage
ucuagaacuuugaccaucagguuuuagagcuagaaauagcaaguuaaaauaaggcuaguccguuaucaacuugaaaaaguggcaccgagucggugcuuuu

SEQ ID NO: 89 - RNA, 100 nt, Artificial Sequence
  Synthetic: G000482 sgRNA modified sequence targeting Human TTR
  modified_base (1)..(3): 2'-O-Me nucleotide
  modified_base (1)..(4): PS linkage
  modified_base (29)..(40): 2'-O-Me nucleotide
  modified_base (69)..(100): 2'-O-Me nucleotide
  modified_base (97)..(100): PS linkage
uguagaagggauauacaaagguuuuagagcuagaaauagcaaguuaaaauaaggcuaguccguuaucaacuugaaaaaguggcaccgagucggugcuuuu

SEQ ID NO: 90 - RNA, 100 nt, Artificial Sequence
  Synthetic: G000483 sgRNA modified sequence targeting Human TTR
  modified_base (1)..(3): 2'-O-Me nucleotide
  modified_base (1)..(4): PS linkage
  modified_base (29)..(40): 2'-O-Me nucleotide
  modified_base (69)..(100): 2'-O-Me nucleotide
  modified_base (97)..(100): PS linkage
uccacucauucuuggcaggaguuuuagagcuagaaauagcaaguuaaaauaaggcuaguccguuaucaacuugaaaaaguggcaccgagucggugcuuuu

SEQ ID NO: 91 - RNA, 100 nt, Artificial Sequence
  Synthetic: G000484 sgRNA modified sequence targeting Human TTR
  modified_base (1)..(3): 2'-O-Me nucleotide
  modified_base (1)..(4): PS linkage
  modified_base (29)..(40): 2'-O-Me nucleotide
  modified_base (69)..(100): 2'-O-Me nucleotide
  modified_base (97)..(100): PS linkage
agacaccaaaucuuacuggaguuuuagagcuagaaauagcaaguuaaaauaaggcuaguccguuaucaacuugaaaaaguggcaccgagucggugcuuuu

SEQ ID NO: 92 - RNA, 100 nt, Artificial Sequence
  Synthetic: G000485 sgRNA modified sequence targeting Human TTR
  modified_base (1)..(3): 2'-O-Me nucleotide
  modified_base (1)..(4): PS linkage
  modified_base (29)..(40): 2'-O-Me nucleotide
  modified_base (69)..(100): 2'-O-Me nucleotide
  modified_base (97)..(100): PS linkage
ccuccucugccuugcuggacguuuuagagcuagaaauagcaaguuaaaauaaggcuaguccguuaucaacuugaaaaaguggcaccgagucggugcuuuu

SEQ ID NO: 93 - RNA, 100 nt, Artificial Sequence
  Synthetic: G000486 sgRNA modified sequence targeting Human TTR
  modified_base (1)..(3): 2'-O-Me nucleotide
  modified_base (1)..(4): PS linkage
  modified_base (29)..(40): 2'-O-Me nucleotide
  modified_base (69)..(100): 2'-O-Me nucleotide
  modified_base (97)..(100): PS linkage
acacaaauaccaguccagcaguuuuagagcuagaaauagcaaguuaaaauaaggcuaguccguuaucaacuugaaaaaguggcaccgagucggugcuuuu

SEQ ID NO: 94 - RNA, 100 nt, Artificial Sequence
  Synthetic: G000487 sgRNA modified sequence targeting Human TTR
  modified_base (1)..(3): 2'-O-Me nucleotide
  modified_base (1)..(4): PS linkage
  modified_base (29)..(40): 2'-O-Me nucleotide
  modified_base (69)..(100): 2'-O-Me nucleotide
  modified_base (97)..(100): PS linkage
uucuuuggcaacuuacccagguuuuagagcuagaaauagcaaguuaaaauaaggcuaguccguuaucaacuugaaaaaguggcaccgagucggugcuuuu

SEQ ID NO: 95 - RNA, 100 nt, Artificial Sequence
  Synthetic: G000488 sgRNA modified sequence targeting Human TTR
  modified_base (1)..(3): 2'-O-Me nucleotide
  modified_base (1)..(4): PS linkage
  modified_base (29)..(40): 2'-O-Me nucleotide
  modified_base (69)..(100): 2'-O-Me nucleotide
  modified_base (97)..(100): PS linkage
aaaguucuagaugcuguccgguuuuagagcuagaaauagcaaguuaaaauaaggcuaguccguuaucaacuugaaaaaguggcaccgagucggugcuuuu

SEQ ID NO: 96 - RNA, 100 nt, Artificial Sequence
  Synthetic: G000489 sgRNA modified sequence targeting Human TTR
  modified_base (1)..(3): 2'-O-Me nucleotide
  modified_base (1)..(4): PS linkage
  modified_base (29)..(40): 2'-O-Me nucleotide
  modified_base (69)..(100): 2'-O-Me nucleotide
  modified_base (97)..(100): PS linkage
uuugaccaucagaggacacuguuuuagagcuagaaauagcaaguuaaaauaaggcuaguccguuaucaacuugaaaaaguggcaccgagucggugcuuuu

SEQ ID NO: 97 - RNA, 100 nt, Artificial Sequence
  Synthetic: G000490 sgRNA modified sequence targeting Human TTR
  modified_base (1)..(3): 2'-O-Me nucleotide
  modified_base (1)..(4): PS linkage
  modified_base (29)..(40): 2'-O-Me nucleotide
  modified_base (69)..(100): 2'-O-Me nucleotide
  modified_base (97)..(100): PS linkage
aaauagacaccaaaucuuacguuuuagagcuagaaauagcaaguuaaaauaaggcuaguccguuaucaacuugaaaaaguggcaccgagucggugcuuuu

SEQ ID NO: 98 - RNA, 100 nt, Artificial Sequence
  Synthetic: G000491 sgRNA modified sequence targeting Human TTR
  modified_base (1)..(3): 2'-O-Me nucleotide
  modified_base (1)..(4): PS linkage
  modified_base (29)..(40): 2'-O-Me nucleotide
  modified_base (69)..(100): 2'-O-Me nucleotide
  modified_base (97)..(100): PS linkage
auaccaguccagcaaggcagguuuuagagcuagaaauagcaaguuaaaauaaggcuaguccguuaucaacuugaaaaaguggcaccgagucggugcuuuu

SEQ ID NO: 99 - RNA, 100 nt, Artificial Sequence
  Synthetic: G000492 sgRNA modified sequence targeting Human TTR
  modified_base (1)..(3): 2'-O-Me nucleotide
  modified_base (1)..(4): PS linkage
  modified_base (29)..(40): 2'-O-Me nucleotide
  modified_base (69)..(100): 2'-O-Me nucleotide
  modified_base (97)..(100): PS linkage
cuucucuacacccagggcacguuuuagagcuagaaauagcaaguuaaaauaaggcuaguccguuaucaacuugaaaaaguggcaccgagucggugcuuuu

SEQ ID NO: 100 - RNA, 100 nt, Artificial Sequence
  Synthetic: G000493 sgRNA modified sequence targeting Human TTR
  modified_base (1)..(3): 2'-O-Me nucleotide
  modified_base (1)..(4): PS linkage
  modified_base (29)..(40): 2'-O-Me nucleotide
  modified_base (69)..(100): 2'-O-Me nucleotide
  modified_base (97)..(100): PS linkage
aagugccuuccaguaagauuguuuuagagcuagaaauagcaaguuaaaauaaggcuaguccguuaucaacuugaaaaaguggcaccgagucggugcuuuu

SEQ ID NO: 101 - RNA, 100 nt, Artificial Sequence
  Synthetic: G000494 sgRNA modified sequence targeting Human TTR
  modified_base (1)..(3): 2'-O-Me nucleotide
  modified_base (1)..(4): PS linkage
  modified_base (29)..(40): 2'-O-Me nucleotide
  modified_base (69)..(100): 2'-O-Me nucleotide
  modified_base (97)..(100): PS linkage
gugagucuggagagcugcauguuuuagagcuagaaauagcaaguuaaaauaaggcuaguccguuaucaacuugaaaaaguggcaccgagucggugcuuuu

SEQ ID NO: 102 - RNA, 100 nt, Artificial Sequence
  Synthetic: G000495 sgRNA modified sequence targeting Human TTR
  modified_base (1)..(3): 2'-O-Me nucleotide
  modified_base (1)..(4): PS linkage
  modified_base (29)..(40): 2'-O-Me nucleotide
  modified_base (69)..(100): 2'-O-Me nucleotide
  modified_base (97)..(100): PS linkage
cagaggacacuuggauucacguuuuagagcuagaaauagcaaguuaaaauaaggcuaguccguuaucaacuugaaaaaguggcaccgagucggugcuuuu

SEQ ID NO: 103 - RNA, 100 nt, Artificial Sequence
  Synthetic: G000496 sgRNA modified sequence targeting Human TTR
  modified_base (1)..(3): 2'-O-Me nucleotide
  modified_base (1)..(4): PS linkage
  modified_base (29)..(40): 2'-O-Me nucleotide
  modified_base (69)..(100): 2'-O-Me nucleotide
  modified_base (97)..(100): PS linkage
ggccgugcauguguucagaaguuuuagagcuagaaauagcaaguuaaaauaaggcuaguccguuaucaacuugaaaaaguggcaccgagucggugcuuuu

SEQ ID NO: 104 - RNA, 100 nt, Artificial Sequence
  Synthetic: G000497 sgRNA modified sequence targeting Human TTR
  modified_base (1)..(3): 2'-O-Me nucleotide
  modified_base (1)..(4): PS linkage
  modified_base (29)..(40): 2'-O-Me nucleotide
  modified_base (69)..(100): 2'-O-Me nucleotide
  modified_base (97)..(100): PS linkage
cugcuccuccucugccuugcguuuuagagcuagaaauagcaaguuaaaauaaggcuaguccguuaucaacuugaaaaaguggcaccgagucggugcuuuu

SEQ ID NO: 105 - RNA, 100 nt, Artificial Sequence
  Synthetic: G000498 sgRNA modified sequence targeting Human TTR
  modified_base (1)..(3): 2'-O-Me nucleotide
  modified_base (1)..(4): PS linkage
  modified_base (29)..(40): 2'-O-Me nucleotide
  modified_base (69)..(100): 2'-O-Me nucleotide
  modified_base (97)..(100): PS linkage
agugagucuggagagcugcaguuuuagagcuagaaauagcaaguuaaaauaaggcuaguccguuaucaacuugaaaaaguggcaccgagucggugcuuuu

SEQ ID NO: 106 - RNA, 100 nt, Artificial Sequence
  Synthetic: G000499 sgRNA modified sequence targeting Human TTR
  modified_base (1)..(3): 2'-O-Me nucleotide
  modified_base (1)..(4): PS linkage
  modified_base (29)..(40): 2'-O-Me nucleotide
  modified_base (69)..(100): 2'-O-Me nucleotide
  modified_base (97)..(100): PS linkage
ugaauccaaguguccucugaguuuuagagcuagaaauagcaaguuaaaauaaggcuaguccguuaucaacuugaaaaaguggcaccgagucggugcuuuu

SEQ ID NO: 107 - RNA, 100 nt, Artificial Sequence
  Synthetic: G000500 sgRNA modified sequence targeting Human TTR
  modified_base (1)..(3): 2'-O-Me nucleotide
  modified_base (1)..(4): PS linkage
  modified_base (29)..(40): 2'-O-Me nucleotide
  modified_base (69)..(100): 2'-O-Me nucleotide
  modified_base (97)..(100): PS linkage
ccaguccagcaaggcagaggguuuuagagcuagaaauagcaaguuaaaauaaggcuaguccguuaucaacuugaaaaaguggcaccgagucggugcuuuu

SEQ ID NO: 108 - RNA, 100 nt, Artificial Sequence
  Synthetic: G000501 sgRNA modified sequence targeting Human TTR
  modified_base (1)..(3): 2'-O-Me nucleotide
  modified_base (1)..(4): PS linkage
  modified_base (29)..(40): 2'-O-Me nucleotide
  modified_base (69)..(100): 2'-O-Me nucleotide
  modified_base (97)..(100): PS linkage
ucacagaaacacucaccguaguuuuagagcuagaaauagcaaguuaaaauaaggcuaguccguuaucaacuugaaaaaguggcaccgagucggugcuuuu

SEQ ID NO: 109 - RNA, 100 nt, Artificial Sequence
  Synthetic: G000567 sgRNA modified sequence targeting Human TTR
  modified_base (1)..(3): 2'-O-Me nucleotide
  modified_base (1)..(4): PS linkage
  modified_base (29)..(40): 2'-O-Me nucleotide
  modified_base (69)..(100): 2'-O-Me nucleotide
  modified_base (97)..(100): PS linkage
gaaaggcugcugaugacaccguuuuagagcuagaaauagcaaguuaaaauaaggcuaguccguuaucaacuugaaaaaguggcaccgagucggugcuuuu

SEQ ID NO: 110 - RNA, 100 nt, Artificial Sequence
  Synthetic: G000568 sgRNA modified sequence targeting Human TTR
  modified_base (1)..(3): 2'-O-Me nucleotide
  modified_base (1)..(4): PS linkage
  modified_base (29)..(40): 2'-O-Me nucleotide
  modified_base (69)..(100): 2'-O-Me nucleotide
  modified_base (97)..(100): PS linkage
ggcugucgucaccaaucccaguuuuagagcuagaaauagcaaguuaaaauaaggcuaguccguuaucaacuugaaaaaguggcaccgagucggugcuuuu

SEQ ID NO: 111 - RNA, 100 nt, Artificial Sequence
  Synthetic: G000570 sgRNA modified sequence targeting Human TTR
  modified_base (1)..(3): 2'-O-Me nucleotide
  modified_base (1)..(4): PS linkage
  modified_base (29)..(40): 2'-O-Me nucleotide
  modified_base (69)..(100): 2'-O-Me nucleotide
  modified_base (97)..(100): PS linkage
cauugauggcaggacugccuguuuuagagcuagaaauagcaaguuaaaauaaggcuaguccguuaucaacuugaaaaaguggcaccgagucggugcuuuu

SEQ ID NO: 112 - RNA, 100 nt, Artificial Sequence
  Synthetic: G000571 sgRNA modified sequence targeting Human TTR
  modified_base (1)..(3): 2'-O-Me nucleotide
  modified_base (1)..(4): PS linkage
  modified_base (29)..(40): 2'-O-Me nucleotide
  modified_base (69)..(100): 2'-O-Me nucleotide
  modified_base (97)..(100): PS linkage
gucacagaaacacucaccguguuuuagagcuagaaauagcaaguuaaaauaaggcuaguccguuaucaacuugaaaaaguggcaccgagucggugcuuuu

SEQ ID NO: 113 - RNA, 100 nt, Artificial Sequence
  Synthetic: G000572 sgRNA modified sequence targeting Human TTR
  modified_base (1)..(3): 2'-O-Me nucleotide
  modified_base (1)..(4): PS linkage
  modified_base (29)..(40): 2'-O-Me nucleotide
  modified_base (69)..(100): 2'-O-Me nucleotide
  modified_base (97)..(100): PS linkage
ccccuacuccuauuccaccaguuuuagagcuagaaauagcaaguuaaaauaaggcuaguccguuaucaacuugaaaaaguggcaccgagucggugcuuuu

SEQ ID NO: 114 - RNA, 100 nt, Artificial Sequence
  Synthetic: G000502 sgRNA modified sequence targeting Cyno TTR
  modified_base (1)..(3): 2'-O-Me nucleotide
  modified_base (1)..(4): PS linkage
  modified_base (29)..(40): 2'-O-Me nucleotide
  modified_base (69)..(100): 2'-O-Me nucleotide
  modified_base (97)..(100): PS linkage
acacaaauaccaguccagcgguuuuagagcuagaaauagcaaguuaaaauaaggcuaguccguuaucaacuugaaaaaguggcaccgagucggugcuuuu

SEQ ID NO: 115 - RNA, 100 nt, Artificial Sequence
  Synthetic: G000503 sgRNA modified sequence targeting Cyno TTR
  modified_base (1)..(3): 2'-O-Me nucleotide
  modified_base (1)..(4): PS linkage
  modified_base (29)..(40): 2'-O-Me nucleotide
  modified_base (69)..(100): 2'-O-Me nucleotide
  modified_base (97)..(100): PS linkage
aaaaggcugcugaugagaccguuuuagagcuagaaauagcaaguuaaaauaaggcuaguccguuaucaacuugaaaaaguggcaccgagucggugcuuuu

SEQ ID NO: 116 - RNA, 100 nt, Artificial Sequence
  Synthetic: G000504 sgRNA modified sequence targeting Cyno TTR
  modified_base (1)..(3): 2'-O-Me nucleotide
  modified_base (1)..(4): PS linkage
  modified_base (29)..(40): 2'-O-Me nucleotide
  modified_base (69)..(100): 2'-O-Me nucleotide
  modified_base (97)..(100): PS linkage
aaaggcugcugaugagaccuguuuuagagcuagaaauagcaaguuaaaauaaggcuaguccguuaucaacuugaaaaaguggcaccgagucggugcuuuu

SEQ ID NO: 117 - RNA, 100 nt, Artificial Sequence
  Synthetic: G000505 sgRNA modified sequence targeting Cyno TTR
  modified_base (1)..(3): 2'-O-Me nucleotide
  modified_base (1)..(4): PS linkage
  modified_base (29)..(40): 2'-O-Me nucleotide
  modified_base (69)..(100): 2'-O-Me nucleotide
  modified_base (97)..(100): PS linkage
cauugacagcaggacugccuguuuuagagcuagaaauagcaaguuaaaauaaggcuaguccguuaucaacuugaaaaaguggcaccgagucggugcuuuu

SEQ ID NO: 118 - RNA, 100 nt, Artificial Sequence
  Synthetic: G000506 sgRNA modified sequence targeting Cyno TTR
  modified_base (1)..(3): 2'-O-Me nucleotide
  modified_base (1)..(4): PS linkage
  modified_base (29)..(40): 2'-O-Me nucleotide
  modified_base (69)..(100): 2'-O-Me nucleotide
  modified_base (97)..(100): PS linkage
auaccaguccagcgaggcagguuuuagagcuagaaauagcaaguuaaaauaaggcuaguccguuaucaacuugaaaaaguggcaccgagucggugcuuuu

SEQ ID NO: 119 - RNA, 100 nt, Artificial Sequence
  Synthetic: G000507 sgRNA modified sequence targeting Cyno TTR
  modified_base (1)..(3): 2'-O-Me nucleotide
  modified_base (1)..(4): PS linkage
  modified_base (29)..(40): 2'-O-Me nucleotide
  modified_base (69)..(100): 2'-O-Me nucleotide
  modified_base (97)..(100): PS linkage
ccaguccagcgaggcagaggguuuuagagcuagaaauagcaaguuaaaauaaggcuaguccguuaucaacuugaaaaaguggcaccgagucggugcuuuu

SEQ ID NO: 120 - RNA, 100 nt, Artificial Sequence
  Synthetic: G000508 sgRNA modified sequence targeting Cyno TTR
  modified_base (1)..(3): 2'-O-Me nucleotide
  modified_base (1)..(4): PS linkage
  modified_base (29)..(40): 2'-O-Me nucleotide
  modified_base (69)..(100): 2'-O-Me nucleotide
  modified_base (97)..(100): PS linkage
ccuccucugccucgcuggacguuuuagagcuagaaauagcaaguuaaaauaaggcuaguccguuaucaacuugaaaaaguggcaccgagucggugcuuuu

SEQ ID NO: 121 - RNA, 100 nt, Artificial Sequence
  Synthetic: G000509 sgRNA modified sequence targeting Cyno TTR
  modified_base (1)..(3): 2'-O-Me nucleotide
  modified_base (1)..(4): PS linkage
  modified_base (29)..(40): 2'-O-Me nucleotide
  modified_base (69)..(100): 2'-O-Me nucleotide
  modified_base (97)..(100): PS linkage
aaaguucuagaugccguccgguuuuagagcuagaaauagcaaguuaaaauaaggcuaguccguuaucaacuugaaaaaguggcaccgagucggugcuuuu

SEQ ID NO: 122 - RNA, 100 nt, Artificial Sequence
  Synthetic: G000510 sgRNA modified sequence targeting Cyno TTR
  modified_base (1)..(3): 2'-O-Me nucleotide
  modified_base (1)..(4): PS linkage
  modified_base (29)..(40): 2'-O-Me nucleotide
  modified_base (69)..(100): 2'-O-Me nucleotide
  modified_base (97)..(100): PS linkage
acuugucuucucuauacccaguuuuagagcuagaaauagcaaguuaaaauaaggcuaguccguuaucaacuugaaaaaguggcaccgagucggugcuuuu

SEQ ID NO: 123 - RNA, 100 nt, Artificial Sequence
  Synthetic: G000511 sgRNA modified sequence targeting Cyno TTR
  modified_base (1)..(3): 2'-O-Me nucleotide
  modified_base (1)..(4): PS linkage
  modified_base (29)..(40): 2'-O-Me nucleotide
  modified_base (69)..(100): 2'-O-Me nucleotide
  modified_base (97)..(100): PS linkage
aagugacuuccaguaagauuguuuuagagcuagaaauagcaaguuaaaauaaggcuaguccguuaucaacuugaaaaaguggcaccgagucggugcuuuu

SEQ ID NO: 124 - RNA, 100 nt, Artificial Sequence
  Synthetic: G000282 sgRNA modified sequence targeting Mouse TTR
  modified_base (1)..(3): 2'-O-Me nucleotide
  modified_base (1)..(4): PS linkage
  modified_base (29)..(40): 2'-O-Me nucleotide
  modified_base (69)..(100): 2'-O-Me nucleotide
  modified_base (97)..(100): PS linkage
uuacagccacgucuacagcaguuuuagagcuagaaauagcaaguuaaaauaaggcuaguccguuaucaacuugaaaaaguggcaccgagucggugcuuuu

SEQ ID NO: 125 - RNA, 80 nt, Artificial Sequence
  Synthetic: exemplary nucleotide sequence
guuuuagagcuagaaauagcaaguuaaaauaaggcuaguccguuaucaacuugaaaaaguggcaccgagucggugcuuuu

SEQ ID NO: 126 - RNA, 22 nt, Artificial Sequence
  Synthetic: exemplary nucleotide sequence
guuuuagagcuaugcuguuuug

SEQ ID NO: 127-200 - skipped (74 entries)

SEQ ID NO: 201 - DNA, 4140 bp, Artificial Sequence
  Synthetic: Cas9 DNA coding sequence 2
atggacaagaagtacagcatcggactggacatcggaacaaacagcgtcggatgggcagtcatcacagacgaatacaaggtcccgagcaagaagttcaaggtcctgggaaacacagacagacacagcatcaagaagaacctgatcggagcactgctgttcgacagcggagaaacagcagaagcaacaagactgaagagaacagcaagaagaagatacacaagaagaaagaacagaatctgctacctgcaggaaatcttcagcaacgaaatggcaaaggtcgacgacagcttcttccacagactggaagaaagcttcctggtcgaagaagacaagaagcacgaaagacacccgatcttcggaaacatcgtcgacgaagtcgcataccacgaaaagtacccgacaatctaccacctgagaaagaagctggtcgacagcacagacaaggcagacctgagactgatctacctggcactggcacacatgatcaagttcagaggacacttcctgatcgaaggagacctgaacccggacaacagcgacgtcgacaagctgttcatccagctggtccagacatacaaccagctgttcgaagaaaacccgatcaacgcaagcggagtcgacgcaaaggcaatcctgagcgcaagactgagcaagagcagaagactggaaaacctgatcgcacagctgccgggagaaaagaagaacggactgttcggaaacctgatcgcactgagcctgggactgacaccgaacttcaagagcaacttcgacctggcagaagacgcaaagctgcagctgagcaaggacacatacgacgacgacctggacaacctgctggcacagatcggagaccagtacgcagacctgttcctggcagcaaagaacctgagcgacgcaatcctgctgagcgacatcctgagagtcaacacagaaatcacaaaggcaccgctgagcgcaagcatgatcaagagatacgacgaacaccaccaggacctgacactgctgaaggcactggtcagacagcagctgccggaaaagtacaaggaaatcttcttcgaccagagcaagaacggatacgcaggatacatcgacggaggagcaagccaggaagaattctacaagttcatcaagccgatcctggaaaagatggacggaacagaagaactgctggtcaagctgaacagagaagacctgctgagaaagcagagaacattcgacaacggaagcatcccgcaccagatccacctgggagaactgcacgcaatcctgagaagacaggaagacttctacccgttcctgaaggacaacagagaaaagatcgaaaagatcctgacattcagaatcccgtactacgtcggaccgctggcaagaggaaacagcagattcgcatggatgacaagaaagagcgaagaaacaatcacaccgtggaacttcgaagaagtcgtcgacaagggagcaagcgcacagagcttcatcgaaagaatgacaaacttcgacaagaacctgccgaacgaaaaggtcctgccgaagcacagcctgctgtacgaatacttcacagtctacaacgaactgacaaaggtcaagtacgtcacagaaggaatgagaaagccggcattcctgagcggagaacagaagaaggcaatcgtcgacctgctgttcaagacaaacagaaaggtcacagtcaagcagctgaaggaagactacttcaagaagatcgaatgcttcgacagcgtcgaaatcagcggagtcgaagacagattcaacgcaagcctgggaacataccacgacctgctgaagatcatcaaggacaaggacttcctggacaacgaagaaaacgaagacatcctggaagacatcgtcctgacactgacactgttcgaagacagagaaatgatcgaagaaagactgaagacatacgcacacctgttcgacgacaaggtcatgaagcagctgaagagaagaagatacacaggatggggaagactgagcagaaagctgatcaacggaatcagagacaagcagagcggaaagacaatcctggacttcctgaagagcgacggattcgcaaacagaaacttcatgcagctgatccacgacgacagcctgacattcaaggaagacatccagaaggcacaggtcagcggacagggagacagcctgcacgaacacatcgcaaacctggcaggaagcccggcaatcaagaagggaatcctgcagacagtcaaggtcgtcgacgaactggtcaaggtcatgggaagacacaagccggaaaacatcgtcatcgaaatggcaagagaaaaccagacaacacagaagggacagaagaacagcagagaaagaatgaagagaatcgaagaaggaatcaaggaactgggaagccagatcctgaaggaacacccggtcgaaaacacacagctgcagaacgaaaagctgtacctgtactacctgcagaacggaagagacatgtacgtcgaccaggaactggacatcaacagactgagcgactacgacgtcgaccacatcgtcccgcagagcttcctgaaggacgacagcatcgacaacaaggtcctgacaagaagcgacaagaacagaggaaagagcgacaacgtcccgagcgaagaagtcgtcaagaagatgaagaactactggagacagctgctgaacgcaaagctgatcacacagagaaagttcgacaacctgacaaaggcagagagaggaggactgagcgaactggacaaggcaggattcatcaagagacagctggtcgaaacaagacagatcacaaagcacgtcgcacagatcctggacagcagaatgaacacaaagtacgacgaaaacgacaagctgatcagagaagtcaaggtcatcacactgaagagcaagctggtcagcgacttcagaaaggacttccagttctacaaggtcagagaaatcaacaactaccaccacgcacacgacgcatacctgaacgcagtcgtcggaacagcactgatcaagaagtacccgaagctggaaagcgaattcgtctacggagactacaaggtctacgacgtcagaaagatgatcgcaaagagcgaacaggaaatcggaaaggcaacagcaaagtacttcttctacagcaacatcatgaacttcttcaagacagaaatcacactggcaaacggagaaatcagaaagagaccgctgatcgaaacaaacggagaaacaggagaaatcgtctgggacaagggaagagacttcgcaacagtcagaaaggtcctgagcatgccgcaggtcaacatcgtcaagaagacagaagtccagacaggaggattcagcaaggaaagcatcctgccgaagagaaacagcgacaagctgatcgcaagaaagaaggactgggacccgaagaagtacggaggattcgacagcccgacagtcgcatacagcgtcctggtcgtcgcaaaggtcgaaaagggaaagagcaagaagctgaagagcgtcaaggaactgctgggaatcacaatcatggaaagaagcagcttcgaaaagaacccgatcgacttcctggaagcaaagggatacaaggaagtcaagaaggacctgatcatcaagctgccgaagtacagcctgttcgaactggaaaacggaagaaagagaatgctggcaagcgcaggagaactgcagaagggaaacgaactggcactgccgagcaagtacgtcaacttcctgtacctggcaagccactacgaaaagctgaagggaagcccggaagacaacgaacagaagcagctgttcgtcgaacagcacaagcactacctggacgaaatcatcgaacagatcagcgaattcagcaagagagtcatcctggcagacgcaaacctggacaaggtcctgagcgcatacaacaagcacagagacaagccgatcagagaacaggcagaaaacatcatccacctgttcacactgacaaacctgggagcaccggcagcattcaagtacttcgacacaacaatcgacagaaagagatacacaagcacaaaggaagtcctggacgcaacactgatccaccagagcatcacaggactgtacgaaacaagaatcgacctgagccagctgggaggagacggaggaggaagcccgaagaagaagagaaaggtctag

SEQ ID NO: 202 - DNA, 4143 bp, Artificial Sequence
  Synthetic: Cas9 DNA coding sequence 1
atggataagaagtactcaatcgggctggatatcggaactaattccgtgggttgggcagtgatcacggatgaatacaaagtgccgtccaagaagttcaaggtcctggggaacaccgatagacacagcatcaagaaaaatctcatcggagccctgctgtttgactccggcgaaaccgcagaagcgacccggctcaaacgtaccgcgaggcgacgctacacccggcggaagaatcgcatctgctatctgcaagagatcttttcgaacgaaatggcaaaggtcgacgacagcttcttccaccgcctggaagaatctttcctggtggaggaggacaagaagcatgaacggcatcctatctttggaaacatcgtcgacgaagtggcgtaccacgaaaagtacccgaccatctaccatctgcggaagaagttggttgactcaactgacaaggccgacctcagattgatctacttggccctcgcccatatgatcaaattccgcggacacttcctgatcgaaggcgatctgaaccctgataactccgacgtggataagcttttcattcaactggtgcagacctacaaccaactgttcgaagaaaacccaatcaatgctagcggcgtcgatgccaaggccatcctgtccgcccggctgtcgaagtcgcggcgcctcgaaaacctgatcgcacagctgccgggagagaaaaagaacggacttttcggcaacttgatcgctctctcactgggactcactcccaatttcaagtccaattttgacctggccgaggacgcgaagctgcaactctcaaaggacacctacgacgacgacttggacaatttgctggcacaaattggcgatcagtacgcggatctgttccttgccgctaagaacctttcggacgcaatcttgctgtccgatatcctgcgcgtgaacaccgaaataaccaaagcgccgcttagcgcctcgatgattaagcggtacgacgagcatcaccaggatctcacgctgctcaaagcgctcgtgagacagcaactgcctgaaaagtacaaggagatcttcttcgaccagtccaagaatgggtacgcagggtacatcgatggaggcgctagccaggaagagttctataagttcatcaagccaatcctggaaaagatggacggaaccgaagaactgctggtcaagctgaacagggaggatctgctccggaaacagagaacctttgacaacggatccattccccaccagatccatctgggtgagctgcacgccatcttgcggcgccaggaggacttttacccattcctcaaggacaaccgggaaaagatcgagaaaattctgacgttccgcatcccgtattacgtgggcccactggcgcgcggcaattcgcgcttcgcgtggatgactagaaaatcagaggaaaccatcactccttggaatttcgaggaagttgtggataagggagcttcggcacaaagcttcatcgaacgaatgaccaacttcgacaagaatctcccaaacgagaaggtgcttcctaagcacagcctcctttacgaatacttcactgtctacaacgaactgactaaagtgaaatacgttactgaaggaatgaggaagccggcctttctgtccggagaacagaagaaagcaattgtcgatctgctgttcaagaccaaccgcaaggtgaccgtcaagcagcttaaagaggactacttcaagaagatcgagtgtttcgactcagtggaaatcagcggggtggaggacagattcaacgcttcgctgggaacctatcatgatctcctgaagatcatcaaggacaaggacttccttgacaacgaggagaacgaggacatcctggaagatatcgtcctgaccttgacccttttcgaggatcgcgagatgatcgaggagaggcttaagacctacgctcatctcttcgacgataaggtcatgaaacaactcaagcgccgccggtacactggttggggccgcctctcccgcaagctgatcaacggtattcgcgataaacagagcggtaaaactatcctggatttcctcaaatcggatggcttcgctaatcgtaacttcatgcaattgatccacgacgacagcctgacctttaaggaggacatccaaaaagcacaagtgtccggacagggagactcactccatgaacacatcgcgaatctggccggttcgccggcgattaagaagggaattctgcaaactgtgaaggtggtcgacgagctggtgaaggtcatgggacggcacaaaccggagaatatcgtgattgaaatggcccgagaaaaccagactacccagaagggccagaaaaactcccgcgaaaggatgaagcggatcgaagaaggaatcaaggagctgggcagccagatcctgaaagagcacccggtggaaaacacgcagctgcagaacgagaagctctacctgtactatttgcaaaatggacgggacatgtacgtggaccaagagctggacatcaatcggttgtctgattacgacgtggaccacatcgttccacagtcctttctgaaggatgactcgatcgataacaaggtgttgactcgcagcgacaagaacagagggaagtcagataatgtgccatcggaggaggtcgtgaagaagatgaagaattactggcggcagctcctgaatgcgaagctgattacccagagaaagtttgacaatctcactaaagccgagcgcggcggactctcagagctggataaggctggattcatcaaacggcagctggtcgagactcggcagattaccaagcacgtggcgcagatcttggactcccgcatgaacactaaatacgacgagaacgataagctcatccgggaagtgaaggtgattaccctgaaaagcaaacttgtgtcggactttcggaaggactttcagttttacaaagtgagagaaatcaacaactaccatcacgcgcatgacgcatacctcaacgctgtggtcggtaccgccctgatcaaaaagtaccctaaacttgaatcggagtttgtgtacggagactacaaggtctacgacgtgaggaagatgatagccaagtccgaacaggaaatcgggaaagcaactgcgaaatacttcttttactcaaacatcatgaactttttcaagactgaaattacgctggccaatggagaaatcaggaagaggccactgatcgaaactaacggagaaacgggcgaaatcgtgtgggacaagggcagggacttcgcaactgttcgcaaagtgctctctatgccgcaagtcaatattgtgaagaaaaccgaagtgcaaaccggcggattttcaaaggaatcgatcctcccaaagagaaatagcgacaagctcattgcacgcaagaaagactgggacccgaagaagtacggaggattcgattcgccgactgtcgcatactccgtcctcgtggtggccaaggtggagaagggaaagagcaaaaagctcaaatccgtcaaagagctgctggggattaccatcatggaacgatcctcgttcgagaagaacccgattgatttcctcgaggcgaagggttacaaggaggtgaagaaggatctgatcatcaaactccccaagtactcactgttcgaactggaaaatggtcggaagcgcatgctggcttcggccggagaactccaaaaaggaaatgagctggccttgcctagcaagtacgtcaacttcctctatcttgcttcgcactacgaaaaactcaaagggtcaccggaagataacgaacagaagcagcttttcgtggagcagcacaagcattatctggatgaaatcatcgaacaaatctccgagttttcaaagcgcgtgatcctcgccgacgccaacctcgacaaagtcctgtcggcctacaataagcatagagataagccgatcagagaacaggccgagaacattatccacttgttcaccctgactaacctgggagccccagccgccttcaagtacttcgatactactatcgatcgcaaaagatacacgtccaccaaggaagttctggacgcgaccctgatccaccaaagcatcactggactctacgaaactaggatcgatctgtcgcagctgggtggcgatggcggtggatctccgaaaaagaagagaaaggtgtaatga

SEQ ID NO: 203 - protein, 1379 aa, Artificial Sequence
  Synthetic: Cas9 amino acid sequence
MDKKYSIGLDIGTNSVGWAVITDEYKVPSKKFKVLGNTDRHSIKKNLIGALLFDSGETAEATRLKRTARRRYTRRKNRICYLQEIFSNEMAKVDDSFFHRLEESFLVEEDKKHERHPIFGNIVDEVAYHEKYPTIYHLRKKLVDSTDKADLRLIYLALAHMIKFRGHFLIEGDLNPDNSDVDKLFIQLVQTYNQLFEENPINASGVDAKAILSARLSKSRRLENLIAQLPGEKKNGLFGNLIALSLGLTPNFKSNFDLAEDAKLQLSKDTYDDDLDNLLAQIGDQYADLFLAAKNLSDAILLSDILRVNTEITKAPLSASMIKRYDEHHQDLTLLKALVRQQLPEKYKEIFFDQSKNGYAGYIDGGASQEEFYKFIKPILEKMDGTEELLVKLNREDLLRKQRTFDNGSIPHQIHLGELHAILRRQEDFYPFLKDNREKIEKILTFRIPYYVGPLARGNSRFAWMTRKSEETITPWNFEEVVDKGASAQSFIERMTNFDKNLPNEKVLPKHSLLYEYFTVYNELTKVKYVTEGMRKPAFLSGEQKKAIVDLLFKTNRKVTVKQLKEDYFKKIECFDSVEISGVEDRFNASLGTYHDLLKIIKDKDFLDNEENEDILEDIVLTLTLFEDREMIEERLKTYAHLFDDKVMKQLKRRRYTGWGRLSRKLINGIRDKQSGKTILDFLKSDGFANRNFMQLIHDDSLTFKEDIQKAQVSGQGDSLHEHIANLAGSPAIKKGILQTVKVVDELVKVMGRHKPENIVIEMARENQTTQKGQKNSRERMKRIEEGIKELGSQILKEHPVENTQLQNEKLYLYYLQNGRDMYVDQELDINRLSDYDVDHIVPQSFLKDDSIDNKVLTRSDKNRGKSDNVPSEEVVKKMKNYWRQLLNAKLITQRKFDNLTKAERGGLSELDKAGFIKRQLVETRQITKHVAQILDSRMNTKYDENDKLIREVKVITLKSKLVSDFRKDFQFYKVREINNYHHAHDAYLNAVVGTALIKKYPKLESEFVYGDYKVYDVRKMIAKSEQEIGKATAKYFFYSNIMNFFKTEITLANGEIRKRPLIETNGETGEIVWDKGRDFATVRKVLSMPQVNIVKKTEVQTGGFSKESILPKRNSDKLIARKKDWDPKKYGGFDSPTVAYSVLVVAKVEKGKSKKLKSVKELLGITIMERSSFEKNPIDFLEAKGYKEVKKDLIIKLPKYSLFELENGRKRMLASAGELQKGNELALPSKYVNFLYLASHYEKLKGSPEDNEQKQLFVEQHKHYLDEIIEQISEFSKRVILADANLDKVLSAYNKHRDKPIREQAENIIHLFTLTNLGAPAAFKYFDTTIDRKRYTSTKEVLDATLIHQSITGLYETRIDLSQLGGDGGGSPKKKRKV

SEQ ID NO: 204 - RNA, 4140 nt, Artificial Sequence
  Synthetic: Cas9 mRNA open reading frame (ORF) 2
auggacaagaaguacagcaucggacuggacaucggaacaaacagcgucggaugggcagucaucacagacgaauacaaggucccgagcaagaaguucaagguccugggaaacacagacagacacagcaucaagaagaaccugaucggagcacugcuguucgacagcggagaaacagcagaagcaacaagacugaagagaacagcaagaagaagauacacaagaagaaagaacagaaucugcuaccugcaggaaaucuucagcaacgaaauggcaaaggucgacgacagcuucuuccacagacuggaagaaagcuuccuggucgaagaagacaagaagcacgaaagacacccgaucuucggaaacaucgucgacgaagucgcauaccacgaaaaguacccgacaaucuaccaccugagaaagaagcuggucgacagcacagacaaggcagaccugagacugaucuaccuggcacuggcacacaugaucaaguucagaggacacuuccugaucgaaggagaccugaacccggacaacagcgacgucgacaagcuguucauccagcugguccagacauacaaccagcuguucgaagaaaacccgaucaacgcaagcggagucgacgcaaaggcaauccugagcgcaagacugagcaagagcagaagacuggaaaaccugaucgcacagcugccgggagaaaagaagaacggacuguucggaaaccugaucgcacugagccugggacugacaccgaacuucaagagcaacuucgaccuggcagaagacgcaaagcugcagcugagcaaggacacauacgacgacgaccuggacaaccugcuggcacagaucggagaccaguacgcagaccuguuccuggcagcaaagaaccugagcgacgcaauccugcugagcgacauccugagagucaacacagaaaucacaaaggcaccgcugagcgcaagcaugaucaagagauacgacgaacaccaccaggaccugacacugcugaaggcacuggucagacagcagcugccggaaaaguacaaggaaaucuucuucgaccagagcaagaacggauacgcaggauacaucgacggaggagcaagccaggaagaauucuacaaguucaucaagccgauccuggaaaagauggacggaacagaagaacugcuggucaagcugaacagagaagaccugcugagaaagcagagaacauucgacaacggaagcaucccgcaccagauccaccugggagaacugcacgcaauccugagaagacaggaagacuucuacccguuccugaaggacaacagagaaaagaucgaaaagauccugacauucagaaucccguacuacgucggaccgcuggcaagaggaaacagcagauucgcauggaugacaagaaagagcgaagaaacaaucacaccguggaacuucgaagaagucgucgacaagggagcaagcgcacagagcuucaucgaaagaaugacaaacuucgacaagaaccugccgaacgaaaagguccugccgaagcacagccugcuguacgaauacuucacagucuacaacgaacugacaaaggucaaguacgucacagaaggaaugagaaagccggcauuccugagcggagaacagaagaaggcaaucgucgaccugcuguucaagacaaacagaaaggucacagucaagcagcugaaggaagacuacuucaagaagaucgaaugcuucgacagcgucgaaaucagcggagucgaagacagauucaacgcaagccugggaacauaccacgaccugcugaagaucaucaaggacaaggacuuccuggacaacgaagaaaacgaagacauccuggaagacaucguccugacacugacacuguucgaagacagagaaaugaucgaagaaagacugaagacauacgcacaccuguucgacgacaaggucaugaagcagcugaagagaagaagauacacaggauggggaagacugagcagaaagcugaucaacggaaucagagacaagcagagcggaaagacaauccuggacuuccugaagagcgacggauucgcaaacagaaacuucaugcagcugauccacgacgacagccugacauucaaggaagacauccagaaggcacaggucagcggacagggagacagccugcacgaacacaucgcaaaccuggcaggaagcccggcaaucaagaagggaauccugcagacagucaaggucgucgacgaacuggucaaggucaugggaagacacaagccggaaaacaucgucaucgaaauggcaagagaaaaccagacaacacagaagggacagaagaacagcagagaaagaaugaagagaaucgaagaaggaaucaaggaacugggaagccagauccugaaggaacacccggucgaaaacacacagcugcagaacgaaaagcuguaccuguacuaccugcagaacggaagagacauguacgucgaccaggaacuggacaucaacagacugagcgacuacgacgucgaccacaucgucccgcagagcuuccugaaggacgacagcaucgacaacaagguccugacaagaagcgacaagaacagaggaaagagcgacaacgucccgagcgaagaagucgucaagaagaugaagaacuacuggagacagcugcugaacgcaaagcugaucacacagagaaaguucgacaaccugacaaaggcagagagaggaggacugagcgaacuggacaaggcaggauucaucaagagacagcuggucgaaacaagacagaucacaaagcacgucgcacagauccuggacagcagaaugaacacaaaguacgacgaaaacgacaagcugaucagagaagucaaggucaucacacugaagagcaagcuggucagcgacuucagaaaggacuuccaguucuacaaggucagagaaaucaacaacuaccaccacgcacacgacgcauaccugaacgcagucgucggaacagcacugaucaagaaguacccgaagcuggaaagcgaauucgucuacggagacuacaaggucuacgacgucagaaagaugaucgcaaagagcgaacaggaaaucggaaaggcaacagcaaaguacuucuucuacagcaacaucaugaacuucuucaagacagaaaucacacuggcaaacggagaaaucagaaagagaccgcugaucgaaacaaacggagaaacaggagaaaucgucugggacaagggaagagacuucgcaacagucagaaagguccugagcaugccgcaggucaacaucgucaagaagacagaaguccagacaggaggauucagcaaggaaagcauccugccgaagagaaacagcgacaagcugaucgcaagaaagaaggacugggacccgaagaaguacggaggauucgacagcccgacagucgcauacagcguccuggucgucgcaaaggucgaaaagggaaagagcaagaagcugaagagcgucaaggaacugcugggaaucacaaucauggaaagaagcagcuucgaaaagaacccgaucgacuuccuggaagcaaagggauacaaggaagucaagaaggaccugaucaucaagcugccgaaguacagccuguucgaacuggaaaacggaagaaagagaaugcuggcaagcgcaggagaacugcagaagggaaacgaacuggcacugccgagcaaguacgucaacuuccuguaccuggcaagccacuacgaaaagcugaagggaagcccggaagacaacgaacagaagcagcuguucgucgaacagcacaagcacuaccuggacgaaaucaucgaacagaucagcgaauucagcaagagagucauccuggcagacgcaaaccuggacaagguccugagcgcauacaacaagcacagagacaagccgaucagagaacaggcagaaaacaucauccaccuguucacacugacaaaccugggagcaccggcagcauucaaguacuucgacacaacaaucgacagaaagagauacacaagcacaaaggaaguccuggacgcaacacugauccaccagagcaucacaggacuguacgaaacaagaaucgaccugagccagcugggaggagacggaggaggaagcccgaagaagaagagaaaggucuag

SEQ ID NO: 205 - RNA, 4143 nt, Artificial Sequence
  Synthetic: Cas9 mRNA ORF 1
auggauaagaaguacucaaucgggcuggauaucggaacuaauuccguggguugggcagugaucacggaugaauacaaagugccguccaagaaguucaagguccuggggaacaccgauagacacagcaucaagaaaaaucucaucggagcccugcuguuugacuccggcgaaaccgcagaagcgacccggcucaaacguaccgcgaggcgacgcuacacccggcggaagaaucgcaucugcuaucugcaagagaucuuuucgaacgaaauggcaaaggucgacgacagcuucuuccaccgccuggaagaaucuuuccugguggaggaggacaagaagcaugaacggcauccuaucuuuggaaacaucgucgacgaaguggcguaccacgaaaaguacccgaccaucuaccaucugcggaagaaguugguugacucaacugacaaggccgaccucagauugaucuacuuggcccucgcccauaugaucaaauuccgcggacacuuccugaucgaaggcgaucugaacccugauaacuccgacguggauaagcuuuucauucaacuggugcagaccuacaaccaacuguucgaagaaaacccaaucaaugcuagcggcgucgaugccaaggccauccuguccgcccggcugucgaagucgcggcgccucgaaaaccugaucgcacagcugccgggagagaaaaagaacggacuuuucggcaacuugaucgcucucucacugggacucacucccaauuucaaguccaauuuugaccuggccgaggacgcgaagcugcaacucucaaaggacaccuacgacgacgacuuggacaauuugcuggcacaaauuggcgaucaguacgcggaucuguuccuugccgcuaagaaccuuucggacgcaaucuugcuguccgauauccugcgcgugaacaccgaaauaaccaaagcgccgcuuagcgccucgaugauuaagcgguacgacgagcaucaccaggaucucacgcugcucaaagcgcucgugagacagcaacugccugaaaaguacaaggagaucuucuucgaccaguccaagaauggguacgcaggguacaucgauggaggcgcuagccaggaagaguucuauaaguucaucaagccaauccuggaaaagauggacggaaccgaagaacugcuggucaagcugaacagggaggaucugcuccggaaacagagaaccuuugacaacggauccauuccccaccagauccaucugggugagcugcacgccaucuugcggcgccaggaggacuuuuacccauuccucaaggacaaccgggaaaagaucgagaaaauucugacguuccgcaucccguauuacgugggcccacuggcgcgcggcaauucgcgcuucgcguggaugacuagaaaaucagaggaaaccaucacuccuuggaauuucgaggaaguuguggauaagggagcuucggcacaaagcuucaucgaacgaaugaccaacuucgacaagaaucucccaaacgagaaggugcuuccuaagcacagccuccuuuacgaauacuucacugucuacaacgaacugacuaaagugaaauacguuacugaaggaaugaggaagccggccuuucuguccggagaacagaagaaagcaauugucgaucugcuguucaagaccaaccgcaaggugaccgucaagcagcuuaaagaggacuacuucaagaagaucgaguguuucgacucaguggaaaucagcgggguggaggacagauucaacgcuucgcugggaaccuaucaugaucuccugaagaucaucaaggacaaggacuuccuugacaacgaggagaacgaggacauccuggaagauaucguccugaccuugacccuuuucgaggaucgcgagaugaucgaggagaggcuuaagaccuacgcucaucucuucgacgauaaggucaugaaacaacucaagcgccgccgguacacugguuggggccgccucucccgcaagcugaucaacgguauucgcgauaaacagagcgguaaaacuauccuggauuuccucaaaucggauggcuucgcuaaucguaacuucaugcaauugauccacgacgacagccugaccuuuaaggaggacauccaaaaagcacaaguguccggacagggagacucacuccaugaacacaucgcgaaucuggccgguucgccggcgauuaagaagggaauucugcaaacugugaagguggucgacgagcuggugaaggucaugggacggcacaaaccggagaauaucgugauugaaauggcccgagaaaaccagacuacccagaagggccagaaaaacucccgcgaaaggaugaagcggaucgaagaaggaaucaaggagcugggcagccagauccugaaagagcacccgguggaaaacacgcagcugcagaacgagaagcucuaccuguacuauuugcaaaauggacgggacauguacguggaccaagagcuggacaucaaucgguugucugauuacgacguggaccacaucguuccacaguccuuucugaaggaugacucgaucgauaacaagguguugacucgcagcgacaagaacagagggaagucagauaaugugccaucggaggaggucgugaagaagaugaagaauuacuggcggcagcuccugaaugcgaagcugauuacccagagaaaguuugacaaucucacuaaagccgagcgcggcggacucucagagcuggauaaggcuggauucaucaaacggcagcuggucgagacucggcagauuaccaagcacguggcgcagaucuuggacucccgcaugaacacuaaauacgacgagaacgauaagcucauccgggaagugaaggugauuacccugaaaagcaaacuugugucggacuuucggaaggacuuucaguuuuacaaagugagagaaaucaacaacuaccaucacgcgcaugacgcauaccucaacgcuguggucgguaccgcccugaucaaaaaguacccuaaacuugaaucggaguuuguguacggagacuacaaggucuacgacgugaggaagaugauagccaaguccgaacaggaaaucgggaaagcaacugcgaaauacuucuuuuacucaaacaucaugaacuuuuucaagacugaaauuacgcuggccaauggagaaaucaggaagaggccacugaucgaaacuaacggagaaacgggcgaaaucgugugggacaagggcagggacuucgcaacuguucgcaaagugcucucuaugccgcaagucaauauugugaagaaaaccgaagugcaaaccggcggauuuucaaaggaaucgauccucccaaagagaaauagcgacaagcucauugcacgcaagaaagacugggacccgaagaaguacggaggauucgauucgccgacugucgcauacuccguccucgugguggccaagguggagaagggaaagagcaaaaagcucaaauccgucaaagagcugcuggggauuaccaucauggaacgauccucguucgagaagaacccgauugauuuccucgaggcgaaggguuacaaggaggugaagaaggaucugaucaucaaacuccccaaguacucacuguucgaacuggaaaauggucggaagcgcaugcuggcuucggccggagaacuccaaaaaggaaaugagcuggccuugccuagcaaguacgucaacuuccucuaucuugcuucgcacuacgaaaaacucaaagggucaccggaagauaacgaacagaagcagcuuuucguggagcagcacaagcauuaucuggaugaaaucaucgaacaaaucuccgaguuuucaaagcgcgugauccucgccgacgccaaccucgacaaaguccugucggccuacaauaagcauagagauaagccgaucagagaacaggccgagaacauuauccacuuguucacccugacuaaccugggagccccagccgccuucaaguacuucgauacuacuaucgaucgcaaaagauacacguccaccaaggaaguucuggacgcgacccugauccaccaaagcaucacuggacucuacgaaacuaggaucgaucugucgcagcuggguggcgauggcgguggaucuccgaaaaagaagagaaagguguaauga

SEQ ID NO: 206 - protein, 1379 aa, Artificial Sequence
  Synthetic: Cas9 nickase (D10A) amino acid sequence
MDKKYSIGLAIGTNSVGWAVITDEYKVPSKKFKVLGNTDRHSIKKNLIGALLFDSGETAEATRLKRTARRRYTRRKNRICYLQEIFSNEMAKVDDSFFHRLEESFLVEEDKKHERHPIFGNIVDEVAYHEKYPTIYHLRKKLVDSTDKADLRLIYLALAHMIKFRGHFLIEGDLNPDNSDVDKLFIQLVQTYNQLFEENPINASGVDAKAILSARLSKSRRLENLIAQLPGEKKNGLFGNLIALSLGLTPNFKSNFDLAEDAKLQLSKDTYDDDLDNLLAQIGDQYADLFLAAKNLSDAILLSDILRVNTEITKAPLSASMIKRYDEHHQDLTLLKALVRQQLPEKYKEIFFDQSKNGYAGYIDGGASQEEFYKFIKPILEKMDGTEELLVKLNREDLLRKQRTFDNGSIPHQIHLGELHAILRRQEDFYPFLKDNREKIEKILTFRIPYYVGPLARGNSRFAWMTRKSEETITPWNFEEVVDKGASAQSFIERMTNFDKNLPNEKVLPKHSLLYEYFTVYNELTKVKYVTEGMRKPAFLSGEQKKAIVDLLFKTNRKVTVKQLKEDYFKKIECFDSVEISGVEDRFNASLGTYHDLLKIIKDKDFLDNEENEDILEDIVLTLTLFEDREMIEERLKTYAHLFDDKVMKQLKRRRYTGWGRLSRKLINGIRDKQSGKTILDFLKSDGFANRNFMQLIHDDSLTFKEDIQKAQVSGQGDSLHEHIANLAGSPAIKKGILQTVKVVDELVKVMGRHKPENIVIEMARENQTTQKGQKNSRERMKRIEEGIKELGSQILKEHPVENTQLQNEKLYLYYLQNGRDMYVDQELDINRLSDYDVDHIVPQSFLKDDSIDNKVLTRSDKNRGKSDNVPSEEVVKKMKNYWRQLLNAKLITQRKFDNLTKAERGGLSELDKAGFIKRQLVETRQITKHVAQILDSRMNTKYDENDKLIREVKVITLKSKLVSDFRKDFQFYKVREINNYHHAHDAYLNAVVGTALIKKYPKLESEFVYGDYKVYDVRKMIAKSEQEIGKATAKYFFYSNIMNFFKTEITLANGEIRKRPLIETNGETGEIVWDKGRDFATVRKVLSMPQVNIVKKTEVQTGGFSKESILPKRNSDKLIARKKDWDPKKYGGFDSPTVAYSVLVVAKVEKGKSKKLKSVKELLGITIMERSSFEKNPIDFLEAKGYKEVKKDLIIKLPKYSLFELENGRKRMLASAGELQKGNELALPSKYVNFLYLASHYEKLKGSPEDNEQKQLFVEQHKHYLDEIIEQISEFSKRVILADANLDKVLSAYNKHRDKPIREQAENIIHLFTLTNLGAPAAFKYFDTTIDRKRYTSTKEVLDATLIHQSITGLYETRIDLSQLGGDGGGSPKKKRKV

SEQ ID NO: 207 - RNA, 4140 nt, Artificial Sequence
  Synthetic: Cas9 nickase (D10A) mRNA ORF
auggacaagaaguacagcaucggacuggcaaucggaacaaacagcgucggaugggcagucaucacagacgaauacaaggucccgagcaagaaguucaagguccugggaaacacagacagacacagcaucaagaagaaccugaucggagcacugcuguucgacagcggagaaacagcagaagcaacaagacugaagagaacagcaagaagaagauacacaagaagaaagaacagaaucugcuaccugcaggaaaucuucagcaacgaaauggcaaaggucgacgacagcuucuuccacagacuggaagaaagcuuccuggucgaagaagacaagaagcacgaaagacacccgaucuucggaaacaucgucgacgaagucgcauaccacgaaaaguacccgacaaucuaccaccugagaaagaagcuggucgacagcacagacaaggcagaccugagacugaucuaccuggcacuggcacacaugaucaaguucagaggacacuuccugaucgaaggagaccugaacccggacaacagcgacgucgacaagcuguucauccagcugguccagacauacaaccagcuguucgaagaaaacccgaucaacgcaagcggagucgacgcaaaggcaauccugagcgcaagacugagcaagagcagaagacuggaaaaccugaucgcacagcugccgggagaaaagaagaacggacuguucggaaaccugaucgcacugagccugggacugacaccgaacuucaagagcaacuucgaccuggcagaagacgcaaagcugcagcugagcaaggacacauacgacgacgaccuggacaaccugcuggcacagaucggagaccaguacgcagaccuguuccuggcagcaaagaaccugagcgacgcaauccugcugagcgacauccugagagucaacacagaaaucacaaaggcaccgcugagcgcaagcaugaucaagagauacgacgaacaccaccaggaccugacacugcugaaggcacuggucagacagcagcugccggaaaaguacaaggaaaucuucuucgaccagagcaagaacggauacgcaggauacaucgacggaggagcaagccaggaagaauucuacaaguucaucaagccgauccuggaaaagauggacggaacagaagaacugcuggucaagcugaacagagaagaccugcugagaaagcagagaacauucgacaacggaagcaucccgcaccagauccaccugggagaacugcacgcaauccugagaagacaggaagacuucuacccguuccugaaggacaacagagaaaagaucgaaaagauccugacauucagaaucccguacuacgucggaccgcuggcaagaggaaacagcagauucgcauggaugacaagaaagagcgaagaaacaaucacaccguggaacuucgaagaagucgucgacaagggagcaagcgcacagagcuucaucgaaagaaugacaaacuucgacaagaaccugccgaacgaaaagguccugccgaagcacagccugcuguacgaauacuucacagucuacaacgaacugacaaaggucaaguacgucacagaaggaaugagaaagccggcauuccugagcggagaacagaagaaggcaaucgucgaccugcuguucaagacaaacagaaaggucacagucaagcagcugaaggaagacuacuucaagaagaucgaaugcuucgacagcgucgaaaucagcggagucgaagacagauucaacgcaagccugggaacauaccacgaccugcugaagaucaucaaggacaaggacuuccuggacaacgaagaaaacgaagacauccuggaagacaucguccugacacugacacuguucgaagacagagaaaugaucgaagaaagacugaagacauacgcacaccuguucgacgacaaggucaugaagcagcugaagagaagaagauacacaggauggggaagacugagcagaaagcugaucaacggaaucagagacaagcagagcggaaagacaauccuggacuuccugaagagcgacggauucgcaaacagaaacuucaugcagcugauccacgacgacagccugacauucaaggaagacauccagaaggcacaggucagcggacagggagacagccugcacgaacacaucgcaaaccuggcaggaagcccggcaaucaagaagggaauccugcagacagucaaggucgucgacgaacuggucaaggucaugggaagacacaagccggaaaacaucgucaucgaaauggcaagagaaaaccagacaacacagaagggacagaagaacagcagagaaagaaugaagagaaucgaagaaggaaucaaggaacugggaagccagauccugaaggaacacccggucgaaaacacacagcugcagaacgaaaagcuguaccuguacuaccugcagaacggaagagacauguacgucgaccaggaacuggacaucaacagacugagcgacuacgacgucgaccacaucgucccgcagagcuuccugaaggacgacagcaucgacaacaagguccugacaagaagcgacaagaacagaggaaagagcgacaacgucccgagcgaagaagucgucaagaagaugaagaacuacuggagacagcugcugaacgcaaagcugaucacacagagaaaguucgacaaccugacaaaggcagagagaggaggacugagcgaacuggacaaggcaggauucaucaagagacagcuggucgaaacaagacagaucacaaagcacgucgcacagauccuggacagcagaaugaacacaaaguacgacgaaaacgacaagcugaucagagaagucaaggucaucacacugaagagcaagcuggucagcgacuucagaaaggacuuccaguucuacaaggucagagaaaucaacaacuaccaccacgcacacgacgcauaccugaacgcagucgucggaacagcacugaucaagaaguacccgaagcuggaaagcgaauucgucuacggagacuacaaggucuacgacgucagaaagaugaucgcaaagagcgaacaggaaaucggaaaggcaacagcaaaguacuucuucuacagcaacaucaugaacuucuucaagacagaaaucacacuggcaaacggagaaaucagaaagagaccgcugaucgaaacaaacggagaaacaggagaaaucgucugggacaagggaagagacuucgcaacagucagaaagguccugagcaugccgcaggucaacaucgucaagaagacagaaguccagacaggaggauucagcaaggaaagcauccugccgaagagaaacagcgacaagcugaucgcaagaaagaaggacugggacccgaagaaguacggaggauucgacagcccgacagucgcauacagcguccuggucgucgcaaaggucgaaaagggaaagagcaagaagcugaagagcgucaaggaacugcugggaaucacaaucauggaaagaagcagcuucgaaaagaacccgaucgacuuccuggaagcaaagggauacaaggaagucaagaaggaccugaucaucaagcugccgaaguacagccuguucgaacuggaaaacggaagaaagagaaugcuggcaagcgcaggagaacugcagaagggaaacgaacuggcacugccgagcaaguacgucaacuuccuguaccuggcaagccacuacgaaaagcugaagggaagcccggaagacaacgaacagaagcagcuguucgucgaacagcacaagcacuaccuggacgaaaucaucgaacagaucagcgaauucagcaagagagucauccuggcagacgcaaaccuggacaagguccugagcgcauacaacaagcacagagacaagccgaucagagaacaggcagaaaacaucauccaccuguucacacugacaaaccugggagcaccggcagcauucaaguacuucgacacaacaaucgacagaaagagauacacaagcacaaaggaaguccuggacgcaacacugauccaccagagcaucacaggacuguacgaaacaagaaucgaccugagccagcugggaggagacggaggaggaagcccgaagaagaagagaaaggucuag

SEQ ID NO: 208 - protein, 1379 aa, Artificial Sequence
  Synthetic: dCas9 (D10A H840A) amino acid sequence
MDKKYSIGLAIGTNSVGWAVITDEYKVPSKKFKVLGNTDRHSIKKNLIGALLFDSGETAEATRLKRTARRRYTRRKNRICYLQEIFSNEMAKVDDSFFHRLEESFLVEEDKKHERHPIFGNIVDEVAYHEKYPTIYHLRKKLVDSTDKADLRLIYLALAHMIKFRGHFLIEGDLNPDNSDVDKLFIQLVQTYNQLFEENPINASGVDAKAILSARLSKSRRLENLIAQLPGEKKNGLFGNLIALSLGLTPNFKSNFDLAEDAKLQLSKDTYDDDLDNLLAQIGDQYADLFLAAKNLSDAILLSDILRVNTEITKAPLSASMIKRYDEHHQDLTLLKALVRQQLPEKYKEIFFDQSKNGYAGYIDGGASQEEFYKFIKPILEKMDGTEELLVKLNREDLLRKQRTFDNGSIPHQIHLGELHAILRRQEDFYPFLKDNREKIEKILTFRIPYYVGPLARGNSRFAWMTRKSEETITPWNFEEVVDKGASAQSFIERMTNFDKNLPNEKVLPKHSLLYEYFTVYNELTKVKYVTEGMRKPAFLSGEQKKAIVDLLFKTNRKVTVKQLKEDYFKKIECFDSVEISGVEDRFNASLGTYHDLLKIIKDKDFLDNEENEDILEDIVLTLTLFEDREMIEERLKTYAHLFDDKVMKQLKRRRYTGWGRLSRKLINGIRDKQSGKTILDFLKSDGFANRNFMQLIHDDSLTFKEDIQKAQVSGQGDSLHEHIANLAGSPAIKKGILQTVKVVDELVKVMGRHKPENIVIEMARENQTTQKGQKNSRERMKRIEEGIKELGSQILKEHPVENTQLQNEKLYLYYLQNGRDMYVDQELDINRLSDYDVDAIVPQSFLKDDSIDNKVLTRSDKNRGKSDNVPSEEVVKKMKNYWRQLLNAKLITQRKFDNLTKAERGGLSELDKAGFIKRQLVETRQITKHVAQILDSRMNTKYDENDKLIREVKVITLKSKLVSDFRKDFQFYKVREINNYHHAHDAYLNAVVGTALIKKYPKLESEFVYGDYKVYDVRKMIAKSEQEIGKATAKYFFYSNIMNFFKTEITLANGEIRKRPLIETNGETGEIVWDKGRDFATVRKVLSMPQVNIVKKTEVQTGGFSKESILPKRNSDKLIARKKDWDPKKYGGFDSPTVAYSVLVVAKVEKGKSKKLKSVKELLGITIMERSSFEKNPIDFLEAKGYKEVKKDLIIKLPKYSLFELENGRKRMLASAGELQKGNELALPSKYVNFLYLASHYEKLKGSPEDNEQKQLFVEQHKHYLDEIIEQISEFSKRVILADANLDKVLSAYNKHRDKPIREQAENIIHLFTLTNLGAPAAFKYFDTTIDRKRYTSTKEVLDATLIHQSITGLYETRIDLSQLGGDGGGSPKKKRKV

SEQ ID NO: 209 - RNA, 4140 nt, Artificial Sequence
  Synthetic: dCas9 (D10A H840A) mRNA ORF
auggacaagaaguacagcaucggacuggcaaucggaacaaacagcgucggaugggcagucaucacagacgaauacaaggucccgagcaagaaguucaagguccugggaaacacagacagacacagcaucaagaagaaccugaucggagcacugcuguucgacagcggagaaacagcagaagcaacaagacugaagagaacagcaagaagaagauacacaagaagaaagaacagaaucugcuaccugcaggaaaucuucagcaacgaaauggcaaaggucgacgacagcuucuuccacagacuggaagaaagcuuccuggucgaagaagacaagaagcacgaaagacacccgaucuucggaaacaucgucgacgaagucgcauaccacgaaaaguacccgacaaucuaccaccugagaaagaagcuggucgacagcacagacaaggcagaccugagacugaucuaccuggcacuggcacacaugaucaaguucagaggacacuuccugaucgaaggagaccugaacccggacaacagcgacgucgacaagcuguucauccagcugguccagacauacaaccagcuguucgaagaaaacccgaucaacgcaagcggagucgacgcaaaggcaauccugagcgcaagacugagcaagagcagaagacuggaaaaccugaucgcacagcugccgggagaaaagaagaacggacuguucggaaaccugaucgcacugagccugggacugacaccgaacuucaagagcaacuucgaccuggcagaagacgcaaagcugcagcugagcaaggacacauacgacgacgaccuggacaaccugcuggcacagaucggagaccaguacgcagaccuguuccuggcagcaaagaaccugagcgacgcaauccugcugagcgacauccugagagucaacacagaaaucacaaaggcaccgcugagcgcaagcaugaucaagagauacgacgaacaccaccaggaccugacacugcugaaggcacuggucagacagcagcugccggaaaaguacaaggaaaucuucuucgaccagagcaagaacggauacgcaggauacaucgacggaggagcaagccaggaagaauucuacaaguucaucaagccgauccuggaaaagauggacggaacagaagaacugcuggucaagcugaacagagaagaccugcugagaaagcagagaacauucgacaacggaagcaucccgcaccagauccaccugggagaacugcacgcaauccugagaagacaggaagacuucuacccguuccugaaggacaacagagaaaagaucgaaaagauccugacauucagaaucccguacuacgucggaccgcuggcaagaggaaacagcagauucgcauggaugacaagaaagagcgaagaaacaaucacaccguggaacuucgaagaagucgucgacaagggagcaagcgcacagagcuucaucgaaagaaugacaaacuucgacaagaaccugccgaacgaaaagguccugccgaagcacagccugcuguacgaauacuucacagucuacaacgaacugacaaaggucaaguacgucacagaaggaaugagaaagccggcauuccugagcggagaacagaagaaggcaaucgucgaccugcuguucaagacaaacagaaaggucacagucaagcagcugaaggaagacuacuucaagaagaucgaaugcuucgacagcgucgaaaucagcggagucgaagacagauucaacgcaagccugggaacauaccacgaccugcugaagaucaucaaggacaaggacuuccuggacaacgaagaaaacgaagacauccuggaagacaucguccugacacugacacuguucgaagacagagaaaugaucgaagaaagacugaagacauacgcacaccuguucgacgacaaggucaugaagcagcugaagagaagaagauacacaggauggggaagacugagcagaaagcugaucaacggaaucagagacaagcagagcggaaagacaauccuggacuuccugaagagcgacggauucgcaaacagaaacuucaugcagcugauccacgacgacagccugacauucaaggaagacauccagaaggcacaggucagcggacagggagacagccugcacgaacacaucgcaaaccuggcaggaagcccggcaaucaagaagggaauccugcagacagucaaggucgucgacgaacuggucaaggucaugggaagacacaagccggaaaacaucgucaucgaaauggcaagagaaaaccagacaacacagaagggacagaagaacagcagagaaagaaugaagagaaucgaagaaggaaucaaggaacugggaagccagauccugaaggaacacccggucgaaaacacacagcugcagaacgaaaagcuguaccuguacuaccugcagaacggaagagacauguacgucgaccaggaacuggacaucaacagacugagcgacuacgacgucgacgcaaucgucccgcagagcuuccugaaggacgacagcaucgacaacaagguccugacaagaagcgacaagaacagaggaaagagcgacaacgucccgagcgaagaagucgucaagaagaugaagaacuacuggagacagcugcugaacgcaaagcugaucacacagagaaaguucgacaaccugacaaaggcagagagaggaggacugagcgaacuggacaaggcaggauucaucaagagacagcuggucgaaacaagacagaucacaaagcacgucgcacagauccuggacagcagaaugaacacaaaguacgacgaaaacgacaagcugaucagagaagucaaggucaucacacugaagagcaagcuggucagcgacuucagaaaggacuuccaguucuacaaggucagagaaaucaacaacuaccaccacgcacacgacgcauaccugaacgcagucgucggaacagcacugaucaagaaguacccgaagcuggaaagcgaauucgucuacggagacuacaaggucuacgacgucagaaagaugaucgcaaagagcgaacaggaaaucggaaaggcaacagcaaaguacuucuucuacagcaacaucaugaacuucuucaagacagaaaucacacuggcaaacggagaaaucagaaagagaccgcugaucgaaacaaacggagaaacaggagaaaucgucugggacaagggaagagacuucgcaacagucagaaagguccugagcaugccgcaggucaacaucgucaagaagacagaaguccagacaggaggauucagcaaggaaagcauccugccgaagagaaacagcgacaagcugaucgcaagaaagaaggacugggacccgaagaaguacggaggauucgacagcccgacagucgcauacagcguccuggucgucgcaaaggucgaaaagggaaagagcaagaagcugaagagcgucaaggaacugcugggaaucacaaucauggaaagaagcagcuucgaaaagaacccgaucgacuuccuggaagcaaagggauacaaggaagucaagaaggaccugaucaucaagcugccgaaguacagccuguucgaacuggaaaacggaagaaagagaaugcuggcaagcgcaggagaacugcagaagggaaacgaacuggcacugccgagcaaguacgucaacuuccuguaccuggcaagccacuacgaaaagcugaagggaagcccggaagacaacgaacagaagcagcuguucgucgaacagcacaagcacuaccuggacgaaaucaucgaacagaucagcgaauucagcaagagagucauccuggcagacgcaaaccuggacaagguccugagcgcauacaacaagcacagagacaagccgaucagagaacaggcagaaaacaucauccaccuguucacacugacaaaccugggagcaccggcagcauucaaguacuucgacacaacaaucgacagaaagagauacacaagcacaaaggaaguccuggacgcaacacugauccaccagagcaucacaggacuguacgaaacaagaaucgaccugagccagcugggaggagacggaggaggaagcccgaagaagaagagaaaggucuag

SEQ ID NO: 210 - RNA, 4134 nt, Artificial Sequence
  Synthetic: Cas9 bare coding sequence
gacaagaaguacagcaucggacuggacaucggaacaaacagcgucggaugggcagucaucacagacgaauacaaggucccgagcaagaaguucaagguccugggaaacacagacagacacagcaucaagaagaaccugaucggagcacugcuguucgacagcggagaaacagcagaagcaacaagacugaagagaacagcaagaagaagauacacaagaagaaagaacagaaucugcuaccugcaggaaaucuucagcaacgaaauggcaaaggucgacgacagcuucuuccacagacuggaagaaagcuuccuggucgaagaagacaagaagcacgaaagacacccgaucuucggaaacaucgucgacgaagucgcauaccacgaaaaguacccgacaaucuaccaccugagaaagaagcuggucgacagcacagacaaggcagaccugagacugaucuaccuggcacuggcacacaugaucaaguucagaggacacuuccugaucgaaggagaccugaacccggacaacagcgacgucgacaagcuguucauccagcugguccagacauacaaccagcuguucgaagaaaacccgaucaacgcaagcggagucgacgcaaaggcaauccugagcgcaagacugagcaagagcagaagacuggaaaaccugaucgcacagcugccgggagaaaagaagaacggacuguucggaaaccugaucgcacugagccugggacugacaccgaacuucaagagcaacuucgaccuggcagaagacgcaaagcugcagcugagcaaggacacauacgacgacgaccuggacaaccugcuggcacagaucggagaccaguacgcagaccuguuccuggcagcaaagaaccugagcgacgcaauccugcugagcgacauccugagagucaacacagaaaucacaaaggcaccgcugagcgcaagcaugaucaagagauacgacgaacaccaccaggaccugacacugcugaaggcacuggucagacagcagcugccggaaaaguacaaggaaaucuucuucgaccagagcaagaacggauacgcaggauacaucgacggaggagcaagccaggaagaauucuacaaguucaucaagccgauccuggaaaagauggacggaacagaagaacugcuggucaagcugaacagagaagaccugcugagaaagcagagaacauucgacaacggaagcaucccgcaccagauccaccugggagaacugcacgcaauccugagaagacaggaagacuucuacccguuccugaaggacaacagagaaaagaucgaaaagauccugacauucagaaucccguacuacgucggaccgcuggcaagaggaaacagcagauucgcauggaugacaagaaagagcgaagaaacaaucacaccguggaacuucgaagaagucgucgacaagggagcaagcgcacagagcuucaucgaaagaaugacaaacuucgacaagaaccugccgaacgaaaagguccugccgaagcacagccugcuguacgaauacuucacagucuacaacgaacugacaaaggucaaguacgucacagaaggaaugagaaagccggcauuccugagcggagaacagaagaaggcaaucgucgaccugcuguucaagacaaacagaaaggucacagucaagcagcugaaggaagacuacuucaagaagaucgaaugcuucgacagcgucgaaaucagcggagucgaagacagauucaacgcaagccugggaacauaccacgaccugcugaagaucaucaaggacaaggacuuccuggacaacgaagaaaacgaagacauccuggaagacaucguccugacacugacacuguucgaagacagagaaaugaucgaagaaagacugaagacauacgcacaccuguucgacgacaaggucaugaagcagcugaagagaagaagauacacaggauggggaagacugagcagaaagcugaucaacggaaucagagacaagcagagcggaaagacaauccuggacuuccugaagagcgacggauucgcaaacagaaacuucaugcagcugauccacgacgacagccugacauucaaggaagacauccagaaggcacaggucagcggacagggagacagccugcacgaacacaucgcaaaccuggcaggaagcccggcaaucaagaagggaauccugcagacagucaaggucgucgacgaacuggucaaggucaugggaagacacaagccggaaaacaucgucaucgaaauggcaagagaaaaccagacaacacagaagggacagaagaacagcagagaaagaaugaagagaaucgaagaaggaaucaaggaacugggaagccagauccugaaggaacacccggucgaaaacacacagcugcagaacgaaaagcuguaccuguacuaccugcagaacggaagagacauguacgucgaccaggaacuggacaucaacagacugagcgacuacgacgucgaccacaucgucccgcagagcuuccugaaggacgacagcaucgacaacaagguccugacaagaagcgacaagaacagaggaaagagcgacaacgucccgagcgaagaagucgucaagaagaugaagaacuacuggagacagcugcugaacgcaaagcugaucacacagagaaaguucgacaaccugacaaaggcagagagaggaggacugagcgaacuggacaaggcaggauucaucaagagacagcuggucgaaacaagacagaucacaaagcacgucgcacagauccuggacagcagaaugaacacaaaguacgacgaaaacgacaagcugaucagagaagucaaggucaucacacugaagagcaagcuggucagcgacuucagaaaggacuuccaguucuacaaggucagagaaaucaacaacuaccaccacgcacacgacgcauaccugaacgcagucgucggaacagcacugaucaagaaguacccgaagcuggaaagcgaauucgucuacggagacuacaaggucuacgacgucagaaagaugaucgcaaagagcgaacaggaaaucggaaaggcaacagcaaaguacuucuucuacagcaacaucaugaacuucuucaagacagaaaucacacuggcaaacggagaaaucagaaagagaccgcugaucgaaacaaacggagaaacaggagaaaucgucugggacaagggaagagacuucgcaacagucagaaagguccugagcaugccgcaggucaacaucgucaagaagacagaaguccagacaggaggauucagcaaggaaagcauccugccgaagagaaacagcgacaagcugaucgcaagaaagaaggacugggacccgaagaaguacggaggauucgacagcccgacagucgcauacagcguccuggucgucgcaaaggucgaaaagggaaagagcaagaagcugaagagcgucaaggaacugcugggaaucacaaucauggaaagaagcagcuucgaaaagaacccgaucgacuuccuggaagcaaagggauacaaggaagucaagaaggaccugaucaucaagcugccgaaguacagccuguucgaacuggaaaacggaagaaagagaaugcuggcaagcgcaggagaacugcagaagggaaacgaacuggcacugccgagcaaguacgucaacuuccuguaccuggcaagccacuacgaaaagcugaagggaagcccggaagacaacgaacagaagcagcuguucgucgaacagcacaagcacuaccuggacgaaaucaucgaacagaucagcgaauucagcaagagagucauccuggcagacgcaaaccuggacaagguccugagcgcauacaacaagcacagagacaagccgaucagagaacaggcagaaaacaucauccaccuguucacacugacaaaccugggagcaccggcagcauucaaguacuucgacacaacaaucgacagaaagagauacacaagcacaaaggaaguccuggacgcaacacugauccaccagagcaucacaggacuguacgaaacaagaaucgaccugagccagcugggaggagacggaggaggaagcccgaagaagaagagaaagguc

SEQ ID NO: 211 - RNA, 4134 nt, Artificial Sequence
  Synthetic: Cas9 nickase bare coding sequence
gacaagaaguacagcaucggacuggcaaucggaacaaacagcgucggaugggcagucaucacagacgaauacaaggucccgagcaagaaguucaagguccugggaaacacagacagacacagcaucaagaagaaccugaucggagcacugcuguucgacagcggagaaacagcagaagcaacaagacugaagagaacagcaagaagaagauacacaagaagaaagaacagaaucugcuaccugcaggaaaucuucagcaacgaaauggcaaaggucgacgacagcuucuuccacagacuggaagaaagcuuccuggucgaagaagacaagaagcacgaaagacacccgaucuucggaaacaucgucgacgaagucgcauaccacgaaaaguacccgacaaucuaccaccugagaaagaagcuggucgacagcacagacaaggcagaccugagacugaucuaccuggcacuggcacacaugaucaaguucagaggacacuuccugaucgaaggagaccugaacccggacaacagcgacgucgacaagcuguucauccagcugguccagacauacaaccagcuguucgaagaaaacccgaucaacgcaagcggagucgacgcaaaggcaauccugagcgcaagacugagcaagagcagaagacuggaaaaccugaucgcacagcugccgggagaaaagaagaacggacuguucggaaaccugaucgcacugagccugggacugacaccgaacuucaagagcaacuucgaccuggcagaagacgcaaagcugcagcugagcaaggacacauacgacgacgaccuggacaaccugcuggcacagaucggagaccaguacgcagaccuguuccuggcagcaaagaaccugagcgacgcaauccugcugagcgacauccugagagucaacacagaaaucacaaaggcaccgcugagcgcaagcaugaucaagagauacgacgaacaccaccaggaccugacacugcugaaggcacuggucagacagcagcugccggaaaaguacaaggaaaucuucuucgaccagagcaagaacggauacgcaggauacaucgacggaggagcaagccaggaagaauucuacaaguucaucaagccgauccuggaaaagauggacggaacagaagaacugcuggucaagcugaacagagaagaccugcugagaaagcagagaacauucgacaacggaagcaucccgcaccagauccaccugggagaacugcacgcaauccugagaagacaggaagacuucuacccguuccugaaggacaacagagaaaagaucgaaaagauccugacauucagaaucccguacuacgucggaccgcuggcaagaggaaacagcagauucgcauggaugacaagaaagagcgaagaaacaaucacaccguggaacuucgaagaagucgucgacaagggagcaagcgcacagagcuucaucgaaagaaugacaaacuucgacaagaaccugccgaacgaaaagguccugccgaagcacagccugcuguacgaauacuucacagucuacaacgaacugacaaaggucaaguacgucacagaaggaaugagaaagccggcauuccugagcggagaacagaagaaggcaaucgucgaccugcuguucaagacaaacagaaaggucacagucaagcagcugaaggaagacuacuucaagaagaucgaaugcuucgacagcgucgaaaucagcggagucgaagacagauucaacgcaagccugggaacauaccacgaccugcugaagaucaucaaggacaaggacuuccuggacaacgaagaaaacgaagacauccuggaagacaucguccugacacugacacuguucgaagacagagaaaugaucgaagaaagacugaagacauacgcacaccuguucgacgacaaggucaugaagcagcugaagagaagaagauacacaggauggggaagacugagcagaaagcugaucaacggaaucagagacaagcagagcggaaagacaauccuggacuuccugaagagcgacggauucgcaaacagaaacuucaugcagcugauccacgacgacagccugacauucaaggaagacauccagaaggcacaggucagcggacagggagacagccugcacgaacacaucgcaaaccuggcaggaagcccggcaaucaagaagggaauccugcagacagucaaggucgucgacgaacuggucaaggucaugggaagacacaagccggaaaacaucgucaucgaaauggcaagagaaaaccagacaacacagaagggacagaagaacagcagagaaagaaugaagagaaucgaagaaggaaucaaggaacugggaagccagauccugaaggaacacccggucgaaaacacacagcugcagaacgaaaagcuguaccuguacuaccugcagaacggaagagacauguacgucgaccaggaacuggacaucaacagacugagcgacuacgacgucgaccacaucgucccgcagagcuuccugaaggacgacagcaucgacaacaagguccugacaagaagcgacaagaacagaggaaagagcgacaacgucccgagcgaagaagucgucaagaagaugaagaacuacuggagacagcugcugaacgcaaagcugaucacacagagaaaguucgacaaccugacaaaggcagagagaggaggacugagcgaacuggacaaggcaggauucaucaagagacagcuggucgaaacaagacagaucacaaagcacgucgcacagauccuggacagcagaaugaacacaaaguacgacgaaaacgacaagcugaucagagaagucaaggucaucacacugaagagcaagcuggucagcgacuucagaaaggacuuccaguucuacaaggucagagaaaucaacaacuaccaccacgcacacgacgcauaccugaacgcagucgucggaacagcacugaucaagaaguacccgaagcuggaaagcgaauucgucuacggagacuacaaggucuacgacgucagaaagaugaucgcaaagagcgaacaggaaaucggaaaggcaacagcaaaguacuucuucuacagcaacaucaugaacuucuucaagacagaaaucacacuggcaaacggagaaaucagaaagagaccgcugaucgaaacaaacggagaaacaggagaaaucgucugggacaagggaagagacuucgcaacagucagaaagguccugagcaugccgcaggucaacaucgucaagaagacagaaguccagacaggaggauucagcaaggaaagcauccugccgaagagaaacagcgacaagcugaucgcaagaaagaaggacugggacccgaagaaguacggaggauucgacagcccgacagucgcauacagcguccuggucgucgcaaaggucgaaaagggaaagagcaagaagcugaagagcgucaaggaacugcugggaaucacaaucauggaaagaagcagcuucgaaaagaacccgaucgacuuccuggaagcaaagggauacaaggaagucaagaaggaccugaucaucaagcugccgaaguacagccuguucgaacuggaaaacggaagaaagagaaugcuggcaagcgcaggagaacugcagaagggaaacgaacuggcacugccgagcaaguacgucaacuuccuguaccuggcaagccacuacgaaaagcugaagggaagcccggaagacaacgaacagaagcagcuguucgucgaacagcacaagcacuaccuggacgaaaucaucgaacagaucagcgaauucagcaagagagucauccuggcagacgcaaaccuggacaagguccugagcgcauacaacaagcacagagacaagccgaucagagaacaggcagaaaacaucauccaccuguucacacugacaaaccugggagcaccggcagcauucaaguacuucgacacaacaaucgacagaaagagauacacaagcacaaaggaaguccuggacgcaacacugauccaccagagcaucacaggacuguacgaaacaagaaucgaccugagccagcugggaggagacggaggaggaagcccgaagaagaagagaaagguc

SEQ ID NO: 212 - RNA, 4134 nt, Artificial Sequence
  Synthetic: dCas9 bare coding sequence
gacaagaaguacagcaucggacuggcaaucggaacaaacagcgucggaugggcagucaucacagacgaauacaaggucccgagcaagaaguucaagguccugggaaacacagacagacacagcaucaagaagaaccugaucggagcacugcuguucgacagcggagaaacagcagaagcaacaagacugaagagaacagcaagaagaagauacacaagaagaaagaacagaaucugcuaccugcaggaaaucuucagcaacgaaauggcaaaggucgacgacagcuucuuccacagacuggaagaaagcuuccuggucgaagaagacaagaagcacgaaagacacccgaucuucggaaacaucgucgacgaagucgcauaccacgaaaaguacccgacaaucuaccaccugagaaagaagcuggucgacagcacagacaaggcagaccugagacugaucuaccuggcacuggcacacaugaucaaguucagaggacacuuccugaucgaaggagaccugaacccggacaacagcgacgucgacaagcuguucauccagcugguccagacauacaaccagcuguucgaagaaaacccgaucaacgcaagcggagucgacgcaaaggcaauccugagcgcaagacugagcaagagcagaagacuggaaaaccugaucgcacagcugccgggagaaaagaagaacggacuguucggaaaccugaucgcacugagccugggacugacaccgaacuucaagagcaacuucgaccuggcagaagacgcaaagcugcagcugagcaaggacacauacgacgacgaccuggacaaccugcuggcacagaucggagaccaguacgcagaccuguuccuggcagcaaagaaccugagcgacgcaauccugcugagcgacauccugagagucaacacagaaaucacaaaggcaccgcugagcgcaagcaugaucaagagauacgacgaacaccaccaggaccugacacugcugaaggcacuggucagacagcagcugccggaaaaguacaaggaaaucuucuucgaccagagcaagaacggauacgcaggauacaucgacggaggagcaagccaggaagaauucuacaaguucaucaagccgauccuggaaaagauggacggaacagaagaacugcuggucaagcugaacagagaagaccugcugagaaagcagagaacauucgacaacggaagcaucccgcaccagauccaccugggagaacugcacgcaauccugagaagacaggaagacuucuacccguuccugaaggacaacagagaaaagaucgaaaagauccugacauucagaaucccguacuacgucggaccgcuggcaagaggaaacagcagauucgcauggaugacaagaaagagcgaagaaacaaucacaccguggaacuucgaagaagucgucgacaagggagcaagcgcacagagcuucaucgaaagaaugacaaacuucgacaagaaccugccgaacgaaaagguccugccgaagcacagccugcuguacgaauacuucacagucuacaacgaacugacaaaggucaaguacgucacagaaggaaugagaaagccggcauuccugagcggagaacagaagaaggcaaucgucgaccugcuguucaagacaaacagaaaggucacagucaagcagcugaaggaagacuacuucaagaagaucgaaugcuucgacagcgucgaaaucagcggagucgaagacagauucaacgcaagccugggaacauaccacgaccugcugaagaucaucaaggacaaggacuuccuggacaacgaagaaaacgaagacauccuggaagacaucguccugacacugacacuguucgaagacagagaaaugaucgaagaaagacugaagacauacgcacaccuguucgacgacaaggucaugaagcagcugaagagaagaagauacacaggauggggaagacugagcagaaagcugaucaacggaaucagagacaagcagagcggaaagacaauccuggacuuccugaagagcgacggauucgcaaacagaaacuucaugcagcugauccacgacgacagccugacauucaaggaagacauccagaaggcacaggucagcggacagggagacagccugcacgaacacaucgcaaaccuggcaggaagcccggcaaucaagaagggaauccugcagacagucaaggucgucgacgaacuggucaaggucaugggaagacacaagccggaaaacaucgucaucgaaauggcaagagaaaaccagacaacacagaagggacagaagaacagcagagaaagaaugaagagaaucgaagaaggaaucaaggaacugggaagccagauccugaaggaacacccggucgaaaacacacagcugcagaacgaaaagcuguaccuguacuaccugcagaacggaagagacauguacgucgaccaggaacuggacaucaacagacugagcgacuacgacgucgacgcaaucgucccgcagagcuuccugaaggacgacagcaucgacaacaagguccugacaagaagcgacaagaacagaggaaagagcgacaacgucccgagcgaagaagucgucaagaagaugaagaacuacuggagacagcugcugaacgcaaagcugaucacacagagaaaguucgacaaccugacaaaggcagagagaggaggacugagcgaacuggacaaggcaggauucaucaagagacagcuggucgaaacaagacagaucacaaagcacgucgcacagauccuggacagcagaaugaacacaaaguacgacgaaaacgacaagcugaucagagaagucaaggucaucacacugaagagcaagcuggucagcgacuucagaaaggacuuccaguucuacaaggucagagaaaucaacaacuaccaccacgcacacgacgcauaccugaacgcagucgucggaacagcacugaucaagaaguacccgaagcuggaaagcgaauucgucuacggagacuacaaggucuacgacgucagaaagaugaucgcaaagagcgaacaggaaaucggaaaggcaacagcaaaguacuucuucuacagcaacaucaugaacuucuucaagacagaaaucacacuggcaaacggagaaaucagaaagagaccgcugaucgaaacaaacggagaaacaggagaaaucgucugggacaagggaagagacuucgcaacagucagaaagguccugagcaugccgcaggucaacaucgucaagaagacagaaguccagacaggaggauucagcaaggaaagcauccugccgaagagaaacagcgacaagcugaucgcaagaaagaaggacugggacccgaagaaguacggaggauucgacagcccgacagucgcauacagcguccuggucgucgcaaaggucgaaaagggaaagagcaagaagcugaagagcgucaaggaacugcugggaaucacaaucauggaaagaagcagcuucgaaaagaacccgaucgacuuccuggaagcaaagggauacaaggaagucaagaaggaccugaucaucaagcugccgaaguacagccuguucgaacuggaaaacggaagaaagagaaugcuggcaagcgcaggagaacugcagaagggaaacgaacuggcacugccgagcaaguacgucaacuuccuguaccuggcaagccacuacgaaaagcugaagggaagcccggaagacaacgaacagaagcagcuguucgucgaacagcacaagcacuaccuggacgaaaucaucgaacagaucagcgaauucagcaagagagucauccuggcagacgcaaaccuggacaagguccugagcgcauacaacaagcacagagacaagccgaucagagaacaggcagaaaacaucauccaccuguucacacugacaaaccugggagcaccggcagcauucaaguacuucgacacaacaaucgacagaaagagauacacaagcacaaaggaaguccuggacgcaacacugauccaccagagcaucacaggacuguacgaaacaagaaucgaccugagccagcugggaggagacggaggaggaagcccgaagaagaagagaaagguc

SEQ ID NO: 213 - protein, 1368 aa, Artificial Sequence [sequence omitted]

SEQ ID NO: 214 - RNA, 4107 nt, Artificial Sequence
  Synthetic: Cas9 mRNA ORF encoding SEQ ID NO: 13 using minimal uridine codons as listed in Table 3, with start and stop codons
auggacaagaaguacagcaucggacuggacaucggaacaaacagcgucggaugggcagucaucacagacgaauacaaggucccgagcaagaaguucaagguccugggaaacacagacagacacagcaucaagaagaaccugaucggagcacugcuguucgacagcggagaaacagcagaagcaacaagacugaagagaacagcaagaagaagauacacaagaagaaagaacagaaucugcuaccugcaggaaaucuucagcaacgaaauggcaaaggucgacgacagcuucuuccacagacuggaagaaagcuuccuggucgaagaagacaagaagcacgaaagacacccgaucuucggaaacaucgucgacgaagucgcauaccacgaaaaguacccgacaaucuaccaccugagaaagaagcuggucgacagcacagacaaggcagaccugagacugaucuaccuggcacuggcacacaugaucaaguucagaggacacuuccugaucgaaggagaccugaacccggacaacagcgacgucgacaagcuguucauccagcugguccagacauacaaccagcuguucgaagaaaacccgaucaacgcaagcggagucgacgcaaaggcaauccugagcgcaagacugagcaagagcagaagacuggaaaaccugaucgcacagcugccgggagaaaagaagaacggacuguucggaaaccugaucgcacugagccugggacugacaccgaacuucaagagcaacuucgaccuggcagaagacgcaaagcugcagcugagcaaggacacauacgacgacgaccuggacaaccugcuggcacagaucggagaccaguacgcagaccuguuccuggcagcaaagaaccugagcgacgcaauccugcugagcgacauccugagagucaacacagaaaucacaaaggcaccgcugagcgcaagcaugaucaagagauacgacgaacaccaccaggaccugacacugcugaaggcacuggucagacagcagcugccggaaaaguacaaggaaaucuucuucgaccagagcaagaacggauacgcaggauacaucgacggaggagcaagccaggaagaauucuacaaguucaucaagccgauccuggaaaagauggacggaacagaagaacugcuggucaagcugaacagagaagaccugcugagaaagcagagaacauucgacaacggaagcaucccgcaccagauccaccugggagaacugcacgcaauccugagaagacaggaagacuucuacccguuccugaaggacaacagagaaaagaucgaaaagauccugacauucagaaucccguacuacgucggaccgcuggcaagaggaaacagcagauucgcauggaugacaagaaagagcgaagaaacaaucacaccguggaacuucgaagaagucgucgacaagggagcaagcgcacagagcuucaucgaaagaaugacaaacuucgacaagaaccugccgaacgaaaagguccugccgaagcacagccugcuguacgaauacuucacagucuacaacgaacugacaaaggucaaguacgucacagaaggaaugagaaagccggcauuccugagcggagaacagaagaaggcaaucgucgaccugcuguucaagacaaacagaaaggucacagucaagcagcugaaggaagacuacuucaagaagaucgaaugcuucgacagcgucgaaaucagcggagucgaagacagauucaacgcaagccugggaacauaccacgaccugcugaagaucaucaaggacaaggacuuccuggacaacgaagaaaacgaagacauccuggaagacaucguccugacacugacacuguucgaagacagagaaaugaucgaagaaagacugaagacauacgcacaccuguucgacgacaaggucaugaagcagcugaagagaagaagauacacaggauggggaagacugagcagaaagcugaucaacggaaucagagacaagcagagcggaaagacaauccuggacuuccugaagagcgacggauucgcaaacagaaacuucaugcagcugauccacgacgacagccugacauucaaggaagacauccagaaggcacaggucagcggacagggagacagccugcacgaacacaucgcaaaccuggcaggaagcccggcaaucaagaagggaauccugcagacagucaaggucgucgacgaacuggucaaggucaugggaagacacaagccggaaaacaucgucaucgaaauggcaagagaaaaccagacaacacagaagggacagaagaacagcagagaaagaaugaagagaaucgaagaaggaaucaaggaacugggaagccagauccugaaggaacacccggucgaaaacacacagcugcagaacgaaaagcuguaccuguacuaccugcagaacggaagagacauguacgucgaccaggaacuggacaucaacagacugagcgacuacgacgucgaccacaucgucccgcagagcuuccugaaggacgacagcaucgacaacaagguccugacaagaagcgacaagaacagaggaaagagcgacaacgucccgagcgaagaagucgucaagaagaugaagaacuacuggagacagcugcugaacgcaaagcugaucacacagagaaaguucgacaaccugacaaaggcagagagaggaggacugagcgaacuggacaaggcaggauucaucaagagacagcuggucgaaacaagacagaucacaaagcacgucgcacagauccuggacagcagaaugaacacaaaguacgacgaaaacgacaagcugaucagagaagucaaggucaucacacugaagagcaagcuggucagcgacuucagaaaggacuuccaguucuacaaggucagagaaaucaacaacuaccaccacgcacacgacgcauaccugaacgcagucgucggaacagcacugaucaagaaguacccgaagcuggaaagcgaauucgucuacggagacuacaaggucuacgacgucagaaagaugaucgcaaagagcgaacaggaaaucggaaaggcaacagcaaaguacuucuucuacagcaacaucaugaacuucuucaagacagaaaucacacuggcaaacggagaaaucagaaagagaccgcugaucgaaacaaacggagaaacaggagaaaucgucugggacaagggaagagacuucgcaacagucagaaagguccugagcaugccgcaggucaacaucgucaagaagacagaaguccagacaggaggauucagcaaggaaagcauccugccgaagagaaacagcgacaagcugaucgcaagaaagaaggacugggacccgaagaaguacggaggauucgacagcccgacagucgcauacagcguccuggucgucgcaaaggucgaaaagggaaagagcaagaagcugaagagcgucaaggaacugcugggaaucacaaucauggaaagaagcagcuucgaaaagaacccgaucgacuuccuggaagcaaagggauacaaggaagucaagaaggaccugaucaucaagcugccgaaguacagccuguucgaacuggaaaacggaagaaagagaaugcuggcaagcgcaggagaacugcagaagggaaacgaacuggcacugccgagcaaguacgucaacuuccuguaccuggcaagccacuacgaaaagcugaagggaagcccggaagacaacgaacagaagcagcuguucgucgaacagcacaagcacuaccuggacgaaaucaucgaacagaucagcgaauucagcaagagagucauccuggcagacgcaaaccuggacaagguccugagcgcauacaacaagcacagagacaagccgaucagagaacaggcagaaaacaucauccaccuguucacacugacaaaccugggagcaccggcagcauucaaguacuucgacacaacaaucgacagaaagagauacacaagcacaaaggaaguccuggacgcaacacugauccaccagagcaucacaggacuguacgaaacaagaaucgaccugagccagcugggaggagacuag

SEQ ID NO: 215 - RNA, 4101 nt, Artificial Sequence
  Synthetic: Cas9 coding sequence encoding SEQ ID NO: 13 using minimal uridine codons as listed in Table 3 (no start or stop codons; suitable for inclusion in fusion protein coding sequence)
gacaagaaguacagcaucggacuggacaucggaacaaacagcgucggaugggcagucaucacagacgaauacaaggucccgagcaagaaguucaagguccugggaaacacagacagacacagcaucaagaagaaccugaucggagcacugcuguucgacagcggagaaacagcagaagcaacaagacugaagagaacagcaagaagaagauacacaagaagaaagaacagaaucugcuaccugcaggaaaucuucagcaacgaaauggcaaaggucgacgacagcuucuuccacagacuggaagaaagcuuccuggucgaagaagacaagaagcacgaaagacacccgaucuucggaaacaucgucgacgaagucgcauaccacgaaaaguacccgacaaucuaccaccugagaaagaagcuggucgacagcacagacaaggcagaccugagacugaucuaccuggcacuggcacacaugaucaaguucagaggacacuuccugaucgaaggagaccugaacccggacaacagcgacgucgacaagcuguucauccagcugguccagacauacaaccagcuguucgaagaaaacccgaucaacgcaagcggagucgacgcaaaggcaauccugagcgcaagacugagcaagagcagaagacuggaaaaccugaucgcacagcugccgggagaaaagaagaacggacuguucggaaaccugaucgcacugagccugggacugacaccgaacuucaagagcaacuucgaccuggcagaagacgcaaagcugcagcugagcaaggacacauacgacgacgaccuggacaaccugcuggcacagaucggagaccaguacgcagaccuguuccuggcagcaaagaaccugagcgacgcaauccugcugagcgacauccugagagucaacacagaaaucacaaaggcaccgcugagcgcaagcaugaucaagagauacgacgaacaccaccaggaccugacacugcugaaggcacuggucagacagcagcugccggaaaaguacaaggaaaucuucuucgaccagagcaagaacggauacgcaggauacaucgacggaggagcaagccaggaagaauucuacaaguucaucaagccgauccuggaaaagauggacggaacagaagaacugcuggucaagcugaacagagaagaccugcugagaaagcagagaacauucgacaacggaagcaucccgcaccagauccaccugggagaacugcacgcaauccugagaagacaggaagacuucuacccguuccugaaggacaacagagaaaagaucgaaaagauccugacauucagaaucccguacuacgucggaccgcuggcaagaggaaacagcagauucgcauggaugacaagaaagagcgaagaaacaaucacaccguggaacuucgaagaagucgucgacaagggagcaagcgcacagagcuucaucgaaagaaugacaaacuucgacaagaaccugccgaacgaaaagguccugccgaagcacagccugcuguacgaauacuucacagucuacaacgaacugacaaaggucaaguacgucacagaaggaaugagaaagccggcauuccugagcggagaacagaagaaggcaaucgucgaccugcuguucaagacaaacagaaaggucacagucaagcagcugaaggaagacuacuucaagaagaucgaaugcuucgacagcgucgaaaucagcggagucgaagacagauucaacgcaagccugggaacauaccacgaccugcugaagaucaucaaggacaaggacuuccuggacaacgaagaaaacgaagacauccuggaagacaucguccugacacugacacuguucgaagacagagaaaugaucgaagaaagacugaagacauacgcacaccuguucgacgacaaggucaugaagcagcugaagagaagaagauacacaggauggggaagacugagcagaaagcugaucaacggaaucagagacaagcagagcggaaagacaauccuggacuuccugaagagcgacggauucgcaaacagaaacuucaugcagcugauccacgacgacagccugacauucaaggaagacauccagaaggcacaggucagcggacagggagacagccugcacgaacacaucgcaaaccuggcaggaagcccggcaaucaagaagggaauccugcagacagucaaggucgucgacgaacuggucaaggucaugggaagacacaagccggaaaacaucgucaucgaaauggcaagagaaaaccagacaacacagaagggacagaagaacagcagagaaagaaugaagagaaucgaagaaggaaucaaggaacugggaagccagauccugaaggaacacccggucgaaaacacacagcugcagaacgaaaagcuguaccuguacuaccugcagaacggaagagacauguacgucgaccaggaacuggacaucaacagacugagcgacuacgacgucgaccacaucgucccgcagagcuuccugaaggacgacagcaucgacaacaagguccugacaagaagcgacaagaacagaggaaagagcgacaacgucccgagcgaagaagucgucaagaagaugaagaacuacuggagacagcugcugaacgcaaagcugaucacacagagaaaguucgacaaccugacaaaggcagagagaggaggacugagcgaacuggacaaggcaggauucaucaagagacagcuggucgaaacaagacagaucacaaagcacgucgcacagauccuggacagcagaaugaacacaaaguacgacgaaaacgacaagcugaucagagaagucaaggucaucacacugaagagcaagcuggucagcgacuucagaaaggacuuccaguucuacaaggucagagaaaucaacaacuaccaccacgcacacgacgcauaccugaacgcagucgucggaacagcacugaucaagaaguacccgaagcuggaaagcgaauucgucuacggagacuacaaggucuacgacgucagaaagaugaucgcaaagagcgaacaggaaaucggaaaggcaacagcaaaguacuucuucuacagcaacaucaugaacuucuucaagacagaaaucacacuggcaaacggagaaaucagaaagagaccgcugaucgaaacaaacggagaaacaggagaaaucgucugggacaagggaagagacuucgcaacagucagaaagguccugagcaugccgcaggucaacaucgucaagaagacagaaguccagacaggaggauucagcaaggaaagcauccugccgaagagaaacagcgacaagcugaucgcaagaaagaaggacugggacccgaagaaguacggaggauucgacagcccgacagucgcauacagcguccuggucgucgcaaaggucgaaaagggaaagagcaagaagcugaagagcgucaaggaacugcugggaaucacaaucauggaaagaagcagcuucgaaaagaacccgaucgacuuccuggaagcaaagggauacaaggaagucaagaaggaccugaucaucaagcugccgaaguacagccuguucgaacuggaaaacggaagaaagagaaugcuggcaagcgcaggagaacugcagaagggaaacgaacuggcacugccgagcaaguacgucaacuuccuguaccuggcaagccacuacgaaaagcugaagggaagcccggaagacaacgaacagaagcagcuguucgucgaacagcacaagcacuaccuggacgaaaucaucgaacagaucagcgaauucagcaagagagucauccuggcagacgcaaaccuggacaagguccugagcgcauacaacaagcacagagacaagccgaucagagaacaggcagaaaacaucauccaccuguucacacugacaaaccugggagcaccggcagcauucaaguacuucgacacaacaaucgacagaaagagauacacaagcacaaaggaaguccuggacgcaacacugauccaccagagcaucacaggacuguacgaaacaagaaucgaccugagccagcugggaggagac

SEQ ID NO: 216 - protein, 1368 aa, Artificial Sequence
  Synthetic: Amino acid sequence of Cas9 nickase (without NLS)
MDKKYSIGLAIGTNSVGWAVITDEYKVPSKKFKVLGNTDRHSIKKNLIGALLFDSGETAEATRLKRTARRRYTRRKNRICYLQEIFSNEMAKVDDSFFHRLEESFLVEEDKKHERHPIFGNIVDEVAYHEKYPTIYHLRKKLVDSTDKADLRLIYLALAHMIKFRGHFLIEGDLNPDNSDVDKLFIQLVQTYNQLFEENPINASGVDAKAILSARLSKSRRLENLIAQLPGEKKNGLFGNLIALSLGLTPNFKSNFDLAEDAKLQLSKDTYDDDLDNLLAQIGDQYADLFLAAKNLSDAILLSDILRVNTEITKAPLSASMIKRYDEHHQDLTLLKALVRQQLPEKYKEIFFDQSKNGYAGYIDGGASQEEFYKFIKPILEKMDGTEELLVKLNREDLLRKQRTFDNGSIPHQIHLGELHAILRRQEDFYPFLKDNREKIEKILTFRIPYYVGPLARGNSRFAWMTRKSEETITPWNFEEVVDKGASAQSFIERMTNFDKNLPNEKVLPKHSLLYEYFTVYNELTKVKYVTEGMRKPAFLSGEQKKAIVDLLFKTNRKVTVKQLKEDYFKKIECFDSVEISGVEDRFNASLGTYHDLLKIIKDKDFLDNEENEDILEDIVLTLTLFEDREMIEERLKTYAHLFDDKVMKQLKRRRYTGWGRLSRKLINGIRDKQSGKTILDFLKSDGFANRNFMQLIHDDSLTFKEDIQKAQVSGQGDSLHEHIANLAGSPAIKKGILQTVKVVDELVKVMGRHKPENIVIEMARENQTTQKGQKNSRERMKRIEEGIKELGSQILKEHPVENTQLQNEKLYLYYLQNGRDMYVDQELDINRLSDYDVDHIVPQSFLKDDSIDNKVLTRSDKNRGKSDNVPSEEVVKKMKNYWRQLLNAKLITQRKFDNLTKAERGGLSELDKAGFIKRQLVETRQITKHVAQILDSRMNTKYDENDKLIREVKVITLKSKLVSDFRKDFQFYKVREINNYHHAHDAYLNAVVGTALIKKYPKLESEFVYGDYKVYDVRKMIAKSEQEIGKATAKYFFYSNIMNFFKTEITLANGEIRKRPLIETNGETGEIVWDKGRDFATVRKVLSMPQVNIVKKTEVQTGGFSKESILPKRNSDKLIARKKDWDPKKYGGFDSPTVAYSVLVVAKVEKGKSKKLKSVKELLGITIMERSSFEKNPIDFLEAKGYKEVKKDLIIKLPKYSLFELENGRKRMLASAGELQKGNELALPSKYVNFLYLASHYEKLKGSPEDNEQKQLFVEQHKHYLDEIIEQISEFSKRVILADANLDKVLSAYNKHRDKPIREQAENIIHLFTLTNLGAPAAFKYFDTTIDRKRYTSTKEVLDATLIHQSITGLYETRIDLSQLGGD

SEQ ID NO: 217 - RNA, 4107 nt, Artificial Sequence
  Synthetic: Cas9 nickase mRNA ORF encoding SEQ ID NO: 16 using minimal uridine codons as listed in Table 3, with start and stop codons
auggacaagaaguacagcaucggacuggcaaucggaacaaacagcgucggaugggcagucaucacagacgaauacaaggucccgagcaagaaguucaagguccugggaaacacagacagacacagcaucaagaagaaccugaucggagcacugcuguucgacagcggagaaacagcagaagcaacaagacugaagagaacagcaagaagaagauacacaagaagaaagaacagaaucugcuaccugcaggaaaucuucagcaacgaaauggcaaaggucgacgacagcuucuuccacagacuggaagaaagcuuccuggucgaagaagacaagaagcacgaaagacacccgaucuucggaaacaucgucgacgaagucgcauaccacgaaaaguacccgacaaucuaccaccugagaaagaagcuggucgacagcacagacaaggcagaccugagacugaucuaccuggcacuggcacacaugaucaaguucagaggacacuuccugaucgaaggagaccugaacccggacaacagcgacgucgacaagcuguucauccagcugguccagacauacaaccagcuguucgaagaaaacccgaucaacgcaagcggagucgacgcaaaggcaauccugagcgcaagacugagcaagagcagaagacuggaaaaccugaucgcacagcugccgggagaaaagaagaacggacuguucggaaaccugaucgcacugagccugggacugacaccgaacuucaagagcaacuucgaccuggcagaagacgcaaagcugcagcugagcaaggacacauacgacgacgaccuggacaaccugcuggcacagaucggagaccaguacgcagaccuguuccuggcagcaaagaaccugagcgacgcaauccugcugagcgacauccugagagucaacacagaaaucacaaaggcaccgcugagcgcaagcaugaucaagagauacgacgaacaccaccaggaccugacacugcugaaggcacuggucagacagcagcugccggaaaaguacaaggaaaucuucuucgaccagagcaagaacggauacgcaggauacaucgacggaggagcaagccaggaagaauucuacaaguucaucaagccgauccuggaaaagauggacggaacagaagaacugcuggucaagcugaacagagaagaccugcugagaaagcagagaacauucgacaacggaagcaucccgcaccagauccaccugggagaacugcacgcaauccugagaagacaggaagacuucuacccguuccugaaggacaacagagaaaagaucgaaaagauccugacauucagaaucccguacuacgucggaccgcuggcaagaggaaacagcagauucgcauggaugacaagaaagagcgaagaaacaaucacaccguggaacuucgaagaagucgucgacaagggagcaagcgcacagagcuucaucgaaagaaugacaaacuucgacaagaaccugccgaacgaaaagguccugccgaagcacagccugcuguacgaauacuucacagucuacaacgaacugacaaaggucaaguacgucacagaaggaaugagaaagccggcauuccugagcggagaacagaagaaggcaaucgucgaccugcuguucaagacaaacagaaaggucacagucaagcagcugaaggaagacuacuucaagaagaucgaaugcuucgacagcgucgaaaucagcggagucgaagacagauucaacgcaagccugggaacauaccacgaccugcugaagaucaucaaggacaaggacuuccuggacaacgaagaaaacgaagacauccuggaagacaucguccugacacugacacuguucgaagacagagaaaugaucgaagaaagacugaagacauacgcacaccuguucgacgacaaggucaugaagcagcugaagagaagaagauacacaggauggggaagacugagcagaaagcugaucaacggaaucagagacaagcagagcggaaagacaauccuggacuuccugaagagcgacggauucgcaaacagaaacuucaugcagcugauccacgacgacagccugacauucaaggaagacauccagaaggcacaggucagcggacagggagacagccugcacgaacacaucgcaaaccuggcaggaagcccggcaaucaagaagggaauccugcagacagucaaggucgucgacgaacuggucaaggucaugggaagacacaagccggaaaacaucgucaucgaaauggcaagagaaaaccagacaacacagaagggacagaagaacagcagagaaagaaugaagagaaucgaagaaggaaucaaggaacugggaagccagauccugaaggaacacccggucgaaaacacacagcugcagaacgaaaagcuguaccuguacuaccugcagaacggaagagacauguacgucgaccaggaacuggacaucaacagacugagcgacuacgacgucgaccacaucgucccgcagagcuuccugaaggacgacagcaucgacaacaagguccugacaagaagcgacaagaacagaggaaagagcgacaacgucccgagcgaagaagucgucaagaagaugaagaacuacuggagacagcugcugaacgcaaagcugaucacacagagaaaguucgacaaccugacaaaggcagagagaggaggacugagcgaacuggacaaggcaggauucaucaagagacagcuggucgaaacaagacagaucacaaagcacgucgcacagauccuggacagcagaaugaacacaaaguacgacgaaaacgacaagcugaucagagaagucaaggucaucacacugaagagcaagcuggucagcgacuucagaaaggacuuccaguucuacaaggucagagaaaucaacaacuaccaccacgcacacgacgcauaccugaacgcagucgucggaacagcacugaucaagaaguacccgaagcuggaaagcgaauucgucuacggagacuacaaggucuacgacgucagaaagaugaucgcaaagagcgaacaggaaaucggaaaggcaacagcaaaguacuucuucuacagcaacaucaugaacuucuucaagacagaaaucacacuggcaaacggagaaaucagaaagagaccgcugaucgaaacaaacggagaaacaggagaaaucgucugggacaagggaagagacuucgcaacagucagaaagguccugagcaugccgcaggucaacaucgucaagaagacagaaguccagacaggaggauucagcaaggaaagcauccugccgaagagaaacagcgacaagcugaucgcaagaaagaaggacugggacccgaagaaguacggaggauucgacagcccgacagucgcauacagcguccuggucgucgcaaaggucgaaaagggaaagagcaagaagcugaagagcgucaaggaacugcugggaaucacaaucauggaaagaagcagcuucgaaaagaacccgaucgacuuccuggaagcaaagggauacaaggaagucaagaaggaccugaucaucaagcugccgaaguacagccuguucgaacuggaaaacggaagaaagagaaugcuggcaagcgcaggagaacugcagaagggaaacgaacuggcacugccgagcaaguacgucaacuuccuguaccuggcaagccacuacgaaaagcugaagggaagcccggaagacaacgaacagaagcagcuguucgucgaacagcacaagcacuaccuggacgaaaucaucgaacagaucagcgaauucagcaagagagucauccuggcagacgcaaaccuggacaagguccugagcgcauacaacaagcacagagacaagccgaucagagaacaggcagaaaacaucauccaccuguucacacugacaaaccugggagcaccggcagcauucaaguacuucgacacaacaaucgacagaaagagauacacaagcacaaaggaaguccuggacgcaacacugauccaccagagcaucacaggacuguacgaaacaagaaucgaccugagccagcugggaggagacuag

SEQ ID NO: 218 - RNA, 4101 nt, Artificial Sequence
  Synthetic: Cas9 nickase coding sequence encoding SEQ ID NO: 16 using minimal uridine codons as listed in Table 3 (no start or stop codons; suitable for inclusion in fusion protein coding sequence)
gacaagaaguacagcaucggacuggcaaucggaacaaacagcgucggaugggcagucaucacagacgaauacaaggucccgagcaagaaguucaagguccugggaaacacagacagacacagcaucaagaagaaccugaucggagcacugcuguucgacagcggagaaacagcagaagcaacaagacugaagagaacagcaagaagaagauacacaagaagaaagaacagaaucugcuaccugcaggaaaucuucagcaacgaaauggcaaaggucgacgacagcuucuuccacagacuggaagaaagcuuccuggucgaagaagacaagaagcacgaaagacacccgaucuucggaaacaucgucgacgaagucgcauaccacgaaaaguacccgacaaucuaccaccugagaaagaagcuggucgacagcacagacaaggcagaccugagacugaucuaccuggcacuggcacacaugaucaaguucagaggacacuuccugaucgaaggagaccugaacccggacaacagcgacgucgacaagcuguucauccagcugguccagacauacaaccagcuguucgaagaaaacccgaucaacgcaagcggagucgacgcaaaggcaauccugagcgcaagacugagcaagagcagaagacuggaaaaccugaucgcacagcugccgggagaaaagaagaacggacuguucggaaaccugaucgcacugagccugggacugacaccgaacuucaagagcaacuucgaccuggcagaagacgcaaagcugcagcugagcaaggacacauacgacgacgaccuggacaaccugcuggcacagaucggagaccaguacgcagaccuguuccuggcagcaaagaaccugagcgacgcaauccugcugagcgacauccugagagucaacacagaaaucacaaaggcaccgcugagcgcaagcaugaucaagagauacgacgaacaccaccaggaccugacacugcugaaggcacuggucagacagcagcugccggaaaaguacaaggaaaucuucuucgaccagagcaagaacggauacgcaggauacaucgacggaggagcaagccaggaagaauucuacaaguucaucaagccgauccuggaaaagauggacggaacagaagaacugcuggucaagcugaacagagaagaccugcugagaaagcagagaacauucgacaacggaagcaucccgcaccagauccaccugggagaacugcacgcaauccugagaagacaggaagacuucuacccguuccugaaggacaacagagaaaagaucgaaaagauccugacauucagaaucccguacuacgucggaccgcuggcaagaggaaacagcagauucgcauggaugacaagaaagagcgaagaaacaaucacaccguggaacuucgaagaagucgucgacaagggagcaagcgcacagagcuucaucgaaagaaugacaaacuucgacaagaaccugccgaacgaaaagguccugccgaagcacagccugcuguacgaauacuucacagucuacaacgaacugacaaaggucaaguacgucacagaaggaaugagaaagccggcauuccugagcggagaacagaagaaggcaaucgucgaccugcuguucaagacaaacagaaaggucacagucaagcagcugaaggaagacuacuucaagaagaucgaaugcuucgacagcgucgaaaucagcggagucgaagacagauucaacgcaagccugggaacauaccacgaccugcugaagaucaucaaggacaaggacuuccuggacaacgaagaaaacgaagacauccuggaagacaucguccugacacugacacuguucgaagacagagaaaugaucgaagaaagacugaagacauacgcacaccuguucgacgacaaggucaugaagcagcugaagagaagaagauacacaggauggggaagacugagcagaaagcugaucaacggaaucagagacaagcagagcggaaagacaauccuggacuuccugaagagcgacggauucgcaaacagaaacuucaugcagcugauccacgacgacagccugacauucaaggaagacauccagaaggcacaggucagcggacagggagacagccugcacgaacacaucgcaaaccuggcaggaagcccggcaaucaagaagggaauccugcagacagucaaggucgucgacgaacuggucaaggucaugggaagacacaagccggaaaacaucgucaucgaaauggcaagagaaaaccagacaacacagaagggacagaagaacagcagagaaagaaugaagagaaucgaagaaggaaucaaggaacugggaagccagauccugaaggaacacccggucgaaaacacacagcugcagaacgaaaagcuguaccuguacuaccugcagaacggaagagacauguacgucgaccaggaacuggacaucaacagacugagcgacuacgacgucgaccacaucgucccgcagagcuuccugaaggacgacagcaucgacaacaagguccugacaagaagcgacaagaacagaggaaagagcgacaacgucccgagcgaagaagucgucaagaagaugaagaacuacuggagacagcugcugaacgcaaagcugaucacacagagaaaguucgacaaccugacaaaggcagagagaggaggacugagcgaacuggacaaggcaggauucaucaagagacagcuggucgaaacaagacagaucacaaagcacgucgcacagauccuggacagcagaaugaacacaaaguacgacgaaaacgacaagcugaucagagaagucaaggucaucacacugaagagcaagcuggucagcgacuucagaaaggacuuccaguucuacaaggucagagaaaucaacaacuaccaccacgcacacgacgcauaccugaacgcagucgucggaacagcacugaucaagaaguacccgaagcuggaaagcgaauucgucuacggagacuacaaggucuacgacgucagaaagaugaucgcaaagagcgaacaggaaaucggaaaggcaacagcaaaguacuucuucuacagcaacaucaugaacuucuucaagacagaaaucacacuggcaaacggagaaaucagaaagagaccgcugaucgaaacaaacggagaaacaggagaaaucgucugggacaagggaagagacuucgcaacagucagaaagguccugagcaugccgcaggucaacaucgucaagaagacagaaguccagacaggaggauucagcaaggaaagcauccugccgaagagaaacagcgacaagcugaucgcaagaaagaaggacugggacccgaagaaguacggaggauucgacagcccgacagucgcauacagcguccuggucgucgcaaaggucgaaaagggaaagagcaagaagcugaagagcgucaaggaacugcugggaaucacaaucauggaaagaagcagcuucgaaaagaacccgaucgacuuccuggaagcaaagggauacaaggaagucaagaaggaccugaucaucaagcugccgaaguacagccuguucgaacuggaaaacggaagaaagagaaugcuggcaagcgcaggagaacugcagaagggaaacgaacuggcacugccgagcaaguacgucaacuuccuguaccuggcaagccacuacgaaaagcugaagggaagcccggaagacaacgaacagaagcagcuguucgucgaacagcacaagcacuaccuggacgaaaucaucgaacagaucagcgaauucagcaagagagucauccuggcagacgcaaaccuggacaagguccugagcgcauacaacaagcacagagacaagccgaucagagaacaggcagaaaacaucauccaccuguucacacugacaaaccugggagcaccggcagcauucaaguacuucgacacaacaaucgacagaaagagauacacaagcacaaaggaaguccuggacgcaacacugauccaccagagcaucacaggacuguacgaaacaagaaucgaccugagccagcugggaggagac

SEQ ID NO: 219 - protein, 1368 aa, Artificial Sequence
  Synthetic: Amino acid sequence of dCas9 (without NLS)
MDKKYSIGLAIGTNSVGWAVITDEYKVPSKKFKVLGNTDRHSIKKNLIGALLFDSGETAEATRLKRTARRRYTRRKNRICYLQEIFSNEMAKVDDSFFHRLEESFLVEEDKKHERHPIFGNIVDEVAYHEKYPTIYHLRKKLVDSTDKADLRLIYLALAHMIKFRGHFLIEGDLNPDNSDVDKLFIQLVQTYNQLFEENPINASGVDAKAILSARLSKSRRLENLIAQLPGEKKNGLFGNLIALSLGLTPNFKSNFDLAEDAKLQLSKDTYDDDLDNLLAQIGDQYADLFLAAKNLSDAILLSDILRVNTEITKAPLSASMIKRYDEHHQDLTLLKALVRQQLPEKYKEIFFDQSKNGYAGYIDGGASQEEFYKFIKPILEKMDGTEELLVKLNREDLLRKQRTFDNGSIPHQIHLGELHAILRRQEDFYPFLKDNREKIEKILTFRIPYYVGPLARGNSRFAWMTRKSEETITPWNFEEVVDKGASAQSFIERMTNFDKNLPNEKVLPKHSLLYEYFTVYNELTKVKYVTEGMRKPAFLSGEQKKAIVDLLFKTNRKVTVKQLKEDYFKKIECFDSVEISGVEDRFNASLGTYHDLLKIIKDKDFLDNEENEDILEDIVLTLTLFEDREMIEERLKTYAHLFDDKVMKQLKRRRYTGWGRLSRKLINGIRDKQSGKTILDFLKSDGFANRNFMQLIHDDSLTFKEDIQKAQVSGQGDSLHEHIANLAGSPAIKKGILQTVKVVDELVKVMGRHKPENIVIEMARENQTTQKGQKNSRERMKRIEEGIKELGSQILKEHPVENTQLQNEKLYLYYLQNGRDMYVDQELDINRLSDYDVDAIVPQSFLKDDSIDNKVLTRSDKNRGKSDNVPSEEVVKKMKNYWRQLLNAKLITQRKFDNLTKAERGGLSELDKAGFIKRQLVETRQITKHVAQILDSRMNTKYDENDKLIREVKVITLKSKLVSDFRKDFQFYKVREINNYHHAHDAYLNAVVGTALIKKYPKLESEFVYGDYKVYDVRKMIAKSEQEIGKATAKYFFYSNIMNFFKTEITLANGEIRKRPLIETNGETGEIVWDKGRDFATVRKVLSMPQVNIVKKTEVQTGGFSKESILPKRNSDKLIARKKDWDPKKYGGFDSPTVAYSVLVVAKVEKGKSKKLKSVKELLGITIMERSSFEKNPIDFLEAKGYKEVKKDLIIKLPKYSLFELENGRKRMLASAGELQKGNELALPSKYVNFLYLASHYEKLKGSPEDNEQKQLFVEQHKHYLDEIIEQISEFSKRVILADANLDKVLSAYNKHRDKPIREQAENIIHLFTLTNLGAPAAFKYFDTTIDRKRYTSTKEVLDATLIHQSITGLYETRIDLSQLGGD

SEQ ID NO: 220 - RNA, 4107 nt, Artificial Sequence
  Synthetic: dCas9 mRNA ORF encoding SEQ ID NO: 19 using minimal uridine codons as listed in Table 3, with start and stop codons
auggacaagaaguacagcaucggacuggcaaucggaacaaacagcgucggaugggcagucaucacagacgaauacaaggucccgagcaagaaguucaagguccugggaaacacagacagacacagcaucaagaagaaccugaucggagcacugcuguucgacagcggagaaacagcagaagcaacaagacugaagagaacagcaagaagaagauacacaagaagaaagaacagaaucugcuaccugcaggaaaucuucagcaacgaaauggcaaaggucgacgacagcuucuuccacagacuggaagaaagcuuccuggucgaagaagacaagaagcacgaaagacacccgaucuucggaaacaucgucgacgaagucgcauaccacgaaaaguacccgacaaucuaccaccugagaaagaagcuggucgacagcacagacaaggcagaccugagacugaucuaccuggcacuggcacacaugaucaaguucagaggacacuuccugaucgaaggagaccugaacccggacaacagcgacgucgacaagcuguucauccagcugguccagacauacaaccagcuguucgaagaaaacccgaucaacgcaagcggagucgacgcaaaggcaauccugagcgcaagacugagcaagagcagaagacuggaaaaccugaucgcacagcugccgggagaaaagaagaacggacuguucggaaaccugaucgcacugagccugggacugacaccgaacuucaagagcaacuucgaccuggcagaagacgcaaagcugcagcugagcaaggacacauacgacgacgaccuggacaaccugcuggcacagaucggagaccaguacgcagaccuguuccuggcagcaaagaaccugagcgacgcaauccugcugagcgacauccugagagucaacacagaaaucacaaaggcaccgcugagcgcaagcaugaucaagagauacgacgaacaccaccaggaccugacacugcugaaggcacuggucagacagcagcugccggaaaaguacaaggaaaucuucuucgaccagagcaagaacggauacgcaggauacaucgacggaggagcaagccaggaagaauucuacaaguucaucaagccgauccuggaaaagauggacggaacagaagaacugcuggucaagcugaacagagaagaccugcugagaaagcagagaacauucgacaacggaagcaucccgcaccagauccaccugggagaacugcacgcaauccugagaagacaggaagacuucuacccguuccugaaggacaacagagaaaagaucgaaaagauccugacauucagaaucccguacuacgucggaccgcuggcaagaggaaacagcagauucgcauggaugacaagaaagagcgaagaaacaaucacaccguggaacuucgaagaagucgucgacaagggagcaagcgcacagagcuucaucgaaagaaugacaaacuucgacaagaaccugccgaacgaaaagguccugccgaagcacagccugcuguacgaauacuucacagucuacaacgaacugacaaaggucaaguacgucacagaaggaaugagaaagccggcauuccugagcggagaacagaagaaggcaaucgucgaccugcuguucaagacaaacagaaaggucacagucaagcagcugaaggaagacuacuucaagaagaucgaaugcuucgacagcgucgaaaucagcggagucgaagacagauucaacgcaagccugggaacauaccacgaccugcugaagaucaucaaggacaaggacuuccuggacaacgaagaaaacgaagacauccuggaagacaucguccugacacugacacuguucgaagacagagaaaugaucgaagaaagacugaagacauacgcacaccuguucgacgacaaggucaugaagcagcugaagagaagaagauacacaggauggggaagacugagcagaaagcugaucaacggaaucagagacaagcagagcggaaagacaauccuggacuuccugaagagcgacggauucgcaaacagaaacuucaugcagcugauccacgacgacagccugacauucaaggaagacauccagaaggcacaggucagcggacagggagacagccugcacgaacacaucgcaaaccuggcaggaagcccggcaaucaagaagggaauccugcagacagucaaggucgucgacgaacuggucaaggucaugggaagacacaagccggaaaacaucgucaucgaaauggcaagagaaaaccagacaacacagaagggacagaagaacagcagagaaagaaugaagagaaucgaagaaggaaucaaggaacugggaagccagauccugaaggaacacccggucgaaaacacacagcugcagaacgaaaagcuguaccuguacuaccugcagaacggaagagacauguacgucgaccaggaacuggacaucaacagacugagcgacuacgacgucgacgcaaucgucccgcagagcuuccugaaggacgacagcaucgacaacaagguccugacaagaagcgacaagaacagaggaaagagcgacaacgucccgagcgaagaagucgucaagaagaugaagaacuacuggagacagcugcugaacgcaaagcugaucacacagagaaaguucgacaaccugacaaaggcagagagaggaggacugagcgaacuggacaaggcaggauucaucaagagacagcuggucgaaacaagacagaucacaaagcacgucgcacagauccuggacagcagaaugaacacaaaguacgacgaaaacgacaagcugaucagagaagucaaggucaucacacugaagagcaagcuggucagcgacuucagaaaggacuuccaguucuacaaggucagagaaaucaacaacuaccaccacgcacacgacgcauaccugaacgcagucgucggaacagcacugaucaagaaguacccgaagcuggaaagcgaauucgucuacggagacuacaaggucuacgacgucagaaagaugaucgcaaagagcgaacaggaaaucggaaaggcaacagcaaaguacuucuucuacagcaacaucaugaacuucuucaagacagaaaucacacuggcaaacggagaaaucagaaagagaccgcugaucgaaacaaacggagaaacaggagaaaucgucugggacaagggaagagacuucgcaacagucagaaagguccugagcaugccgcaggucaacaucgucaagaagacagaaguccagacaggaggauucagcaaggaaagcauccugccgaagagaaacagcgacaagcugaucgcaagaaagaaggacugggacccgaagaaguacggaggauucgacagcccgacagucgcauacagcguccuggucgucgcaaaggucgaaaagggaaagagcaagaagcugaagagcgucaaggaacugcugggaaucacaaucauggaaagaagcagcuucgaaaagaacccgaucgacuuccuggaagcaaagggauacaaggaagucaagaaggaccugaucaucaagcugccgaaguacagccuguucgaacuggaaaacggaagaaagagaaugcuggcaagcgcaggagaacugcagaagggaaacgaacuggcacugccgagcaaguacgucaacuuccuguaccuggcaagccacuacgaaaagcugaagggaagcccggaagacaacgaacagaagcagcuguucgucgaacagcacaagcacuaccuggacgaaaucaucgaacagaucagcgaauucagcaagagagucauccuggcagacgcaaaccuggacaagguccugagcgcauacaacaagcacagagacaagccgaucagagaacaggcagaaaacaucauccaccuguucacacugacaaaccugggagcaccggcagcauucaaguacuucgacacaacaaucgacagaaagagauacacaagcacaaaggaaguccuggacgcaacacugauccaccagagcaucacaggacuguacgaaacaagaaucgaccugagccagcugggaggagacuag

SEQ ID NO: 221 - RNA, 4113 nt, Artificial Sequence
  Synthetic: dCas9 coding sequence encoding SEQ ID NO: 19 using minimal uridine codons as listed in Table 3 (no start or stop codons; suitable for inclusion in fusion protein coding sequence)
gacaagaaguacagcaucggacuggcaaucggaacaaacagcgucggaugggcagucaucacagacgaauacaaggucccgagcaagaaguucaagguccugggaaacacagacagacacagcaucaagaagaaccugaucggagcacugcuguucgacagcggagaaacagcagaagcaacaagacugaagagaacagcaagaagaagauacacaagaagaaagaacagaaucugcuaccugcaggaaaucuucagcaacgaaauggcaaaggucgacgacagcuucuuccacagacuggaagaaagcuuccuggucgaagaagacaagaagcacgaaagacacccgaucuucggaaacaucgucgacgaagucgcauaccacgaaaaguacccgacaaucuaccaccugagaaagaagcuggucgacagcacagacaaggcagaccugagacugaucuaccuggcacuggcacacaugaucaaguucagaggacacuuccugaucgaaggagaccugaacccggacaacagcgacgucgacaagcuguucauccagcugguccagacauacaaccagcuguucgaagaaaacccgaucaacgcaagcggagucgacgcaaaggcaauccugagcgcaagacugagcaagagcagaagacuggaaaaccugaucgcacagcugccgggagaaaagaagaacggacuguucggaaaccugaucgcacugagccugggacugacaccgaacuucaagagcaacuucgaccuggcagaagacgcaaagcugcagcugagcaaggacacauacgacgacgaccuggacaaccugcuggcacagaucggagaccaguacgcagaccuguuccuggcagcaaagaaccugagcgacgcaauccugcugagcgacauccugagagucaacacagaaaucacaaaggcaccgcugagcgcaagcaugaucaagagauacgacgaacaccaccaggaccugacacugcugaaggcacuggucagacagcagcugccggaaaaguacaaggaaaucuucuucgaccagagcaagaacggauacgcaggauacaucgacggaggagcaagccaggaagaauucuacaaguucaucaagccgauccuggaaaagauggacggaacagaagaacugcuggucaagcugaacagagaagaccugcugagaaagcagagaacauucgacaacggaagcaucccgcaccagauccaccugggagaacugcacgcaauccugagaagacaggaagacuucuacccguuccugaaggacaacagagaaaagaucgaaaagauccugacauucagaaucccguacuacgucggaccgcuggcaagaggaaacagcagauucgcauggaugacaagaaagagcgaagaaacaaucacaccguggaacuucgaagaagucgucgacaagggagcaagcgcacagagcuucaucgaaagaaugacaaacuucgacaagaaccugccgaacgaaaagguccugccgaagcacagccugcuguacgaauacuucacagucuacaacgaacugacaaaggucaaguacgucacagaaggaaugagaaagccggcauuccugagcggagaacagaagaaggcaaucgucgaccugcuguucaagacaaacagaaaggucacagucaagcagcugaaggaagacuacuucaagaagaucgaaugcuucgacagcgucgaaaucagcggagucgaagacagauucaacgcaagccugggaacauaccacgaccugcugaagaucaucaaggacaaggacuuccuggacaacgaagaaaacgaagacauccuggaagacaucguccugacacugacacuguucgaagacagagaaaugaucgaagaaagacugaagacauacgcacaccuguucgacgacaaggucaugaagcagcugaagagaagaagauacacaggauggggaagacugagcagaaagcugaucaacggaaucagagacaagcagagcggaaagacaauccuggacuuccugaagagcgacggauucgcaaacagaaacuucaugcagcugauccacgacgacagccugacauucaaggaagacauccagaaggcacaggucagcggacagggagacagccugcacgaacacaucgcaaaccuggcaggaagcccggcaaucaagaagggaauccugcagacagucaaggucgucgacgaacuggucaaggucaugggaagacacaagccggaaaacaucgucaucgaaauggcaagagaaaaccagacaacacagaagggacagaagaacagcagagaaagaaugaagagaaucgaagaaggaaucaaggaacugggaagccagauccugaaggaacacccggucgaaaacacacagcugcagaacgaaaagcuguaccuguacuaccugcagaacggaagagacauguacgucgaccaggaacuggacaucaacagacugagcgacuacgacgucgacgcaaucgucccgcagagcuuccugaaggacgacagcaucgacaacaagguccugacaagaagcgacaagaacagaggaaagagcgacaacgucccgagcgaagaagucgucaagaagaugaagaacuacuggagacagcugcugaacgcaaagcugaucacacagagaaaguucgacaaccugacaaaggcagagagaggaggacugagcgaacuggacaaggcaggauucaucaagagacagcuggucgaaacaagacagaucacaaagcacgucgcacagauccuggacagcagaaugaacacaaaguacgacgaaaacgacaagcugaucagagaagucaaggucaucacacugaagagcaagcuggucagcgacuucagaaaggacuuccaguucuacaaggucagagaaaucaacaacuaccaccacgcacacgacgcauaccugaacgcagucgucggaacagcacugaucaagaaguacccgaagcuggaaagcgaauucgucuacggagacuacaaggucuacgacgucagaaagaugaucgcaaagagcgaacaggaaaucggaaaggcaacagcaaaguacuucuucuacagcaacaucaugaacuucuucaagacagaaaucacacuggcaaacggagaaaucagaaagagaccgcugaucgaaacaaacggagaaacaggagaaaucgucugggacaagggaagagacuucgcaacagucagaaagguccugagcaugccgcaggucaacaucgucaagaagacagaaguccagacaggaggauucagcaaggaaagcauccugccgaagagaaacagcgacaagcugaucgcaagaaagaaggacugggacccgaagaaguacggaggauucgacagcccgacagucgcauacagcguccuggucgucgcaaaggucgaaaagggaaagagcaagaagcugaagagcgucaaggaacugcugggaaucacaaucauggaaagaagcagcuucgaaaagaacccgaucgacuuccuggaagcaaagggauacaaggaagucaagaaggaccugaucaucaagcugccgaaguacagccuguucgaacuggaaaacggaagaaagagaaugcuggcaagcgcaggagaacugcagaagggaaacgaacuggcacugccgagcaaguacgucaacuuccuguaccuggcaagccacuacgaaaagcugaagggaagcccggaagacaacgaacagaagcagcuguucgucgaacagcacaagcacuaccuggacgaaaucaucgaacagaucagcgaauucagcaagagagucauccuggcagacgcaaaccuggacaagguccugagcgcauacaacaagcacagagacaagccgaucagagaacaggcagaaaacaucauccaccuguucacacugacaaaccugggagcaccggcagcauucaaguacuucgacacaacaaucgacagaaagagauacacaagcacaaaggaaguccuggacgcaacacugauccaccagagcaucacaggacuguacgaaacaagaaucgaccugagccagcugggaggagacggaggaggaagc

SEQ ID NO: 222 - protein, 1392 aa, Artificial Sequence
  Synthetic: Amino acid sequence of Cas9 with two nuclear localization signals as the C-terminal amino acids
MDKKYSIGLDIGTNSVGWAVITDEYKVPSKKFKVLGNTDRHSIKKNLIGALLFDSGETAEATRLKRTARRRYTRRKNRICYLQEIFSNEMAKVDDSFFHRLEESFLVEEDKKHERHPIFGNIVDEVAYHEKYPTIYHLRKKLVDSTDKADLRLIYLALAHMIKFRGHFLIEGDLNPDNSDVDKLFIQLVQTYNQLFEENPINASGVDAKAILSARLSKSRRLENLIAQLPGEKKNGLFGNLIALSLGLTPNFKSNFDLAEDAKLQLSKDTYDDDLDNLLAQIGDQYADLFLAAKNLSDAILLSDILRVNTEITKAPLSASMIKRYDEHHQDLTLLKALVRQQLPEKYKEIFFDQSKNGYAGYIDGGASQEEFYKFIKPILEKMDGTEELLVKLNREDLLRKQRTFDNGSIPHQIHLGELHAILRRQEDFYPFLKDNREKIEKILTFRIPYYVGPLARGNSRFAWMTRKSEETITPWNFEEVVDKGASAQSFIERMTNFDKNLPNEKVLPKHSLLYEYFTVYNELTKVKYVTEGMRKPAFLSGEQKKAIVDLLFKTNRKVTVKQLKEDYFKKIECFDSVEISGVEDRFNASLGTYHDLLKIIKDKDFLDNEENEDILEDIVLTLTLFEDREMIEERLKTYAHLFDDKVMKQLKRRRYTGWGRLSRKLINGIRDKQSGKTILDFLKSDGFANRNFMQLIHDDSLTFKEDIQKAQVSGQGDSLHEHIANLAGSPAIKKGILQTVKVVDELVKVMGRHKPENIVIEMARENQTTQKGQKNSRERMKRIEEGIKELGSQILKEHPVENTQLQNEKLYLYYLQNGRDMYVDQELDINRLSDYDVDHIVPQSFLKDDSIDNKVLTRSDKNRGKSDNVPSEEVVKKMKNYWRQLLNAKLITQRKFDNLTKAERGGLSELDKAGFIKRQLVETRQITKHVAQILDSRMNTKYDENDKLIREVKVITLKSKLVSDFRKDFQFYKVREINNYHHAHDAYLNAVVGTALIKKYPKLESEFVYGDYKVYDVRKMIAKSEQEIGKATAKYFFYSNIMNFFKTEITLANGEIRKRPLIETNGETGEIVWDKGRDFATVRKVLSMPQVNIVKKTEVQTGGFSKESILPKRNSDKLIARKKDWDPKKYGGFDSPTVAYSVLVVAKVEKGKSKKLKSVKELLGITIMERSSFEKNPIDFLEAKGYKEVKKDLIIKLPKYSLFELENGRKRMLASAGELQKGNELALPSKYVNFLYLASHYEKLKGSPEDNEQKQLFVEQHKHYLDEIIEQISEFSKRVILADANLDKVLSAYNKHRDKPIREQAENIIHLFTLTNLGAPAAFKYFDTTIDRKRYTSTKEVLDATLIHQSITGLYETRIDLSQLGGDGSGSPKKKRKVDGSPKKKRKVDSG

SEQ ID NO: 223 - RNA, 4179 nt, Artificial Sequence
  Synthetic: Cas9 mRNA ORF encoding SEQ ID NO: 22 using minimal uridine codons as listed in Table 3, with start and stop codons
auggacaagaaguacagcaucggacuggacaucggaacaaacagcgucggaugggcagucaucacagacgaauacaaggucccgagcaagaaguucaagguccugggaaacacagacagacacagcaucaagaagaaccugaucggagcacugcuguucgacagcggagaaacagcagaagcaacaagacugaagagaacagcaagaagaagauacacaagaagaaagaacagaaucugcuaccugcaggaaaucuucagcaacgaaauggcaaaggucgacgacagcuucuuccacagacuggaagaaagcuuccuggucgaagaagacaagaagcacgaaagacacccgaucuucggaaacaucgucgacgaagucgcauaccacgaaaaguacccgacaaucuaccaccugagaaagaagcuggucgacagcacagacaaggcagaccugagacugaucuaccuggcacuggcacacaugaucaaguucagaggacacuuccugaucgaaggagaccugaacccggacaacagcgacgucgacaagcuguucauccagcugguccagacauacaaccagcuguucgaagaaaacccgaucaacgcaagcggagucgacgcaaaggcaauccugagcgcaagacugagcaagagcagaagacuggaaaaccugaucgcacagcugccgggagaaaagaagaacggacuguucggaaaccugaucgcacugagccugggacugacaccgaacuucaagagcaacuucgaccuggcagaagacgcaaagcugcagcugagcaaggacacauacgacgacgaccuggacaaccugcuggcacagaucggagaccaguacgcagaccuguuccuggcagcaaagaaccugagcgacgcaauccugcugagcgacauccugagagucaacacagaaaucacaaaggcaccgcugagcgcaagcaugaucaagagauacgacgaacaccaccaggaccugacacugcugaaggcacuggucagacagcagcugccggaaaaguacaaggaaaucuucuucgaccagagcaagaacggauacgcaggauacaucgacggaggagcaagccaggaagaauucuacaaguucaucaagccgauccuggaaaagauggacggaacagaagaacugcuggucaagcugaacagagaagaccugcugagaaagcagagaacauucgacaacggaagcaucccgcaccagauccaccugggagaacugcacgcaauccugagaagacaggaagacuucuacccguuccugaaggacaacagagaaaagaucgaaaagauccugacauucagaaucccguacuacgucggaccgcuggcaagaggaaacagcagauucgcauggaugacaagaaagagcgaagaaacaaucacaccguggaacuucgaagaagucgucgacaagggagcaagcgcacagagcuucaucgaaagaaugacaaacuucgacaagaaccugccgaacgaaaagguccugccgaagcacagccugcuguacgaauacuucacagucuacaacgaacugacaaaggucaaguacgucacagaaggaaugagaaagccggcauuccugagcggagaacagaagaaggcaaucgucgaccugcuguucaagacaaacagaaaggucacagucaagcagcugaaggaagacuacuucaagaagaucgaaugcuucgacagcgucgaaaucagcggagucgaagacagauucaacgcaagccugggaacauaccacgaccugcugaagaucaucaaggacaaggacuuccuggacaacgaagaaaacgaagacauccuggaagacaucguccugacacugacacuguucgaagacagagaaaugaucgaagaaagacugaagacauacgcacaccuguucgacgacaaggucaugaagcagcugaagagaagaagauacacaggauggggaagacugagcagaaagcugaucaacggaaucagagacaagcagagcggaaagacaauccuggacuuccugaagagcgacggauucgcaaacagaaacuucaugcagcugauccacgacgacagccugacauucaaggaagacauccagaaggcacaggucagcggacagggagacagccugcacgaacacaucgcaaaccuggcaggaagcccggcaaucaagaagggaauccugcagacagucaaggucgucgacgaacuggucaaggucaugggaagacacaagccggaaaacaucgucaucgaaauggcaagagaaaaccagacaacacagaagggacagaagaacagcagagaaagaaugaagagaaucgaagaaggaaucaaggaacugggaagccagauccugaaggaacacccggucgaaaacacacagcugcagaacgaaaagcuguaccuguacuaccugcagaacggaagagacauguacgucgaccaggaacuggacaucaacagacugagcgacuacgacgucgaccacaucgucccgcagagcuuccugaaggacgacagcaucgacaacaagguccugacaagaagcgacaagaacagaggaaagagcgacaacgucccgagcgaagaagucgucaagaagaugaagaacuacuggagacagcugcugaacgcaaagcugaucacacagagaaaguucgacaaccugacaaaggcagagagaggaggacugagcgaacuggacaaggcaggauucaucaagagacagcuggucgaaacaagacagaucacaaagcacgucgcacagauccuggacagcagaaugaacacaaaguacgacgaaaacgacaagcugaucagagaagucaaggucaucacacugaagagcaagcuggucagcgacuucagaaaggacuuccaguucuacaaggucagagaaaucaacaacuaccaccacgcacacgacgcauaccugaacgcagucgucggaacagcacugaucaagaaguacccgaagcuggaaagcgaauucgucuacggagacuacaaggucuacgacgucagaaagaugaucgcaaagagcgaacaggaaaucggaaaggcaacagcaaaguacuucuucuacagcaacaucaugaacuucuucaagacagaaaucacacuggcaaacggagaaaucagaaagagaccgcugaucgaaacaaacggagaaacaggagaaaucgucugggacaagggaagagacuucgcaacagucagaaagguccugagcaugccgcaggucaacaucgucaagaagacagaaguccagacaggaggauucagcaaggaaagcauccugccgaagagaaacagcgacaagcugaucgcaagaaagaaggacugggacccgaagaaguacggaggauucgacagcccgacagucgcauacagcguccuggucgucgcaaaggucgaaaagggaaagagcaagaagcugaagagcgucaaggaacugcugggaaucacaaucauggaaagaagcagcuucgaaaagaacccgaucgacuuccuggaagcaaagggauacaaggaagucaagaaggaccugaucaucaagcugccgaaguacagccuguucgaacuggaaaacggaagaaagagaaugcuggcaagcgcaggagaacugcagaagggaaacgaacuggcacugccgagcaaguacgucaacuuccuguaccuggcaagccacuacgaaaagcugaagggaagcccggaagacaacgaacagaagcagcuguucgucgaacagcacaagcacuaccuggacgaaaucaucgaacagaucagcgaauucagcaagagagucauccuggcagacgcaaaccuggacaagguccugagcgcauacaacaagcacagagacaagccgaucagagaacaggcagaaaacaucauccaccuguucacacugacaaaccugggagcaccggcagcauucaaguacuucgacacaacaaucgacagaaagagauacacaagcacaaaggaaguccuggacgcaacacugauccaccagagcaucacaggacuguacgaaacaagaaucgaccugagccagcugggaggagacggaagcggaagcccgaagaagaagagaaaggucgacggaagcccgaagaagaagagaaaggucgacagcggauag

SEQ ID NO: 224 - RNA, 4173 nt, Artificial Sequence
  Synthetic: Cas9 coding sequence encoding SEQ ID NO: 23 using minimal uridine codons as listed in Table 3 (no start or stop codons; suitable for inclusion in fusion protein coding sequence)
gacaagaaguacagcaucggacuggacaucggaacaaacagcgucggaugggcagucaucacagacgaauacaaggucccgagcaagaaguucaagguccugggaaacacagacagacacagcaucaagaagaaccugaucggagcacugcuguucgacagcggagaaacagcagaagcaacaagacugaagagaacagcaagaagaagauacacaagaagaaagaacagaaucugcuaccugcaggaaaucuucagcaacgaaauggcaaaggucgacgacagcuucuuccacagacuggaagaaagcuuccuggucgaagaagacaagaagcacgaaagacacccgaucuucggaaacaucgucgacgaagucgcauaccacgaaaaguacccgacaaucuaccaccugagaaagaagcuggucgacagcacagacaaggcagaccugagacugaucuaccuggcacuggcacacaugaucaaguucagaggacacuuccugaucgaaggagaccugaacccggacaacagcgacgucgacaagcuguucauccagcugguccagacauacaaccagcuguucgaagaaaacccgaucaacgcaagcggagucgacgcaaaggcaauccugagcgcaagacugagcaagagcagaagacuggaaaaccugaucgcacagcugccgggagaaaagaagaacggacuguucggaaaccugaucgcacugagccugggacugacaccgaacuucaagagcaacuucgaccuggcagaagacgcaaagcugcagcugagcaaggacacauacgacgacgaccuggacaaccugcuggcacagaucggagaccaguacgcagaccuguuccuggcagcaaagaaccugagcgacgcaauccugcugagcgacauccugagagucaacacagaaaucacaaaggcaccgcugagcgcaagcaugaucaagagauacgacgaacaccaccaggaccugacacugcugaaggcacuggucagacagcagcugccggaaaaguacaaggaaaucuucuucgaccagagcaagaacggauacgcaggauacaucgacggaggagcaagccaggaagaauucuacaaguucaucaagccgauccuggaaaagauggacggaacagaagaacugcuggucaagcugaacagagaagaccugcugagaaagcagagaacauucgacaacggaagcaucccgcaccagauccaccugggagaacugcacgcaauccugagaagacaggaagacuucuacccguuccugaaggacaacagagaaaagaucgaaaagauccugacauucagaaucccguacuacgucggaccgcuggcaagaggaaacagcagauucgcauggaugacaagaaagagcgaagaaacaaucacaccguggaacuucgaagaagucgucgacaagggagcaagcgcacagagcuucaucgaaagaaugacaaacuucgacaagaaccugccgaacgaaaagguccugccgaagcacagccugcuguacgaauacuucacagucuacaacgaacugacaaaggucaaguacgucacagaaggaaugagaaagccggcauuccugagcggagaacagaagaaggcaaucgucgaccugcuguucaagacaaacagaaaggucacagucaagcagcugaaggaagacuacuucaagaagaucgaaugcuucgacagcgucgaaaucagcggagucgaagacagauucaacgcaagccugggaacauaccacgaccugcugaagaucaucaaggacaaggacuuccuggacaacgaagaaaacgaagacauccuggaagacaucguccugacacugacacuguucgaagacagagaaaugaucgaagaaagacugaagacauacgcacaccuguucgacgacaaggucaugaagcagcugaagagaagaagauacacaggauggggaagacugagcagaaagcugaucaacggaaucagagacaagcagagcggaaagacaauccuggacuuccugaagagcgacggauucgcaaacagaaacuucaugcagcugauccacgacgacagccugacauucaaggaagacauccagaaggcacaggucagcggacagggagacagccugcacgaacacaucgcaaaccuggcaggaagcccggcaaucaagaagggaauccugcagacagucaaggucgucgacgaacuggucaaggucaugggaagacacaagccggaaaacaucgucaucgaaauggcaagagaaaaccagacaacacagaagggacagaagaacagcagagaaagaaugaagagaaucgaagaaggaaucaaggaacugggaagccagauccugaaggaacacccggucgaaaacacacagcugcagaacgaaaagcuguaccuguacuaccugcagaacggaagagacauguacgucgaccaggaacuggacaucaacagacugagcgacuacgacgucgaccacaucgucccgcagagcuuccugaaggacgacagcaucgacaacaagguccugacaagaagcgacaagaacagaggaaagagcgacaacgucccgagcgaagaagucgucaagaagaugaagaacuacuggagacagcugcugaacgcaaagcugaucacacagagaaaguucgacaaccugacaaaggcagagagaggaggacugagcgaacuggacaaggcaggauucaucaagagacagcuggucgaaacaagacagaucacaaagcacgucgcacagauccuggacagcagaaugaacacaaaguacgacgaaaacgacaagcugaucagagaagucaaggucaucacacugaagagcaagcuggucagcgacuucagaaaggacuuccaguucuacaaggucagagaaaucaacaacuaccaccacgcacacgacgcauaccugaacgcagucgucggaacagcacugaucaagaaguacccgaagcuggaaagcgaauucgucuacggagacuacaaggucuacgacgucagaaagaugaucgcaaagagcgaacaggaaaucggaaaggcaacagcaaaguacuucuucuacagcaacaucaugaacuucuucaagacagaaaucacacuggcaaacggagaaaucagaaagagaccgcugaucgaaacaaacggagaaacaggagaaaucgucugggacaagggaagagacuucgcaacagucagaaagguccugagcaugccgcaggucaacaucgucaagaagacagaaguccagacaggaggauucagcaaggaaagcauccugccgaagagaaacagcgacaagcugaucgcaagaaagaaggacugggacccgaagaaguacggaggauucgacagcccgacagucgcauacagcguccuggucgucgcaaaggucgaaaagggaaagagcaagaagcugaagagcgucaaggaacugcugggaaucacaaucauggaaagaagcagcuucgaaaagaacccgaucgacuuccuggaagcaaagggauacaaggaagucaagaaggaccugaucaucaagcugccgaaguacagccuguucgaacuggaaaacggaagaaagagaaugcuggcaagcgcaggagaacugcagaagggaaacgaacuggcacugccgagcaaguacgucaacuuccuguaccuggcaagccacuacgaaaagcugaagggaagcccggaagacaacgaacagaagcagcuguucgucgaacagcacaagcacuaccuggacgaaaucaucgaacagaucagcgaauucagcaagagagucauccuggcagacgcaaaccuggacaagguccugagcgcauacaacaagcacagagacaagccgaucagagaacaggcagaaaacaucauccaccuguucacacugacaaaccugggagcaccggcagcauucaaguacuucgacacaacaaucgacagaaagagauacacaagcacaaaggaaguccuggacgcaacacugauccaccagagcaucacaggacuguacgaaacaagaaucgaccugagccagcugggaggagacggaagcggaagcccgaagaagaagagaaaggucgacggaagcccgaagaagaagagaaaggucgacagcgga

SEQ ID NO: 225 - protein, 1392 aa, Artificial Sequence
  Synthetic: Amino acid sequence of Cas9 nickase with two nuclear localization signals as the C-terminal amino acids
MDKKYSIGLAIGTNSVGWAVITDEYKVPSKKFKVLGNTDRHSIKKNLIGALLFDSGETAEATRLKRTARRRYTRRKNRICYLQEIFSNEMAKVDDSFFHRLEESFLVEEDKKHERHPIFGNIVDEVAYHEKYPTIYHLRKKLVDSTDKADLRLIYLALAHMIKFRGHFLIEGDLNPDNSDVDKLFIQLVQTYNQLFEENPINASGVDAKAILSARLSKSRRLENLIAQLPGEKKNGLFGNLIALSLGLTPNFKSNFDLAEDAKLQLSKDTYDDDLDNLLAQIGDQYADLFLAAKNLSDAILLSDILRVNTEITKAPLSASMIKRYDEHHQDLTLLKALVRQQLPEKYKEIFFDQSKNGYAGYIDGGASQEEFYKFIKPILEKMDGTEELLVKLNREDLLRKQRTFDNGSIPHQIHLGELHAILRRQEDFYPFLKDNREKIEKILTFRIPYYVGPLARGNSRFAWMTRKSEETITPWNFEEVVDKGASAQSFIERMTNFDKNLPNEKVLPKHSLLYEYFTVYNELTKVKYVTEGMRKPAFLSGEQKKAIVDLLFKTNRKVTVKQLKEDYFKKIECFDSVEISGVEDRFNASLGTYHDLLKIIKDKDFLDNEENEDILEDIVLTLTLFEDREMIEERLKTYAHLFDDKVMKQLKRRRYTGWGRLSRKLINGIRDKQSGKTILDFLKSDGFANRNFMQLIHDDSLTFKEDIQKAQVSGQGDSLHEHIANLAGSPAIKKGILQTVKVVDELVKVMGRHKPENIVIEMARENQTTQKGQKNSRERMKRIEEGIKELGSQILKEHPVENTQLQNEKLYLYYLQNGRDMYVDQELDINRLSDYDVDHIVPQSFLKDDSIDNKVLTRSDKNRGKSDNVPSEEVVKKMKNYWRQLLNAKLITQRKFDNLTKAERGGLSELDKAGFIKRQLVETRQITKHVAQILDSRMNTKYDENDKLIREVKVITLKSKLVSDFRKDFQFYKVREINNYHHAHDAYLNAVVGTALIKKYPKLESEFVYGDYKVYDVRKMIAKSEQEIGKATAKYFFYSNIMNFFKTEITLANGEIRKRPLIETNGETGEIVWDKGRDFATVRKVLSMPQVNIVKKTEVQTGGFSKESILPKRNSDKLIARKKDWDPKKYGGFDSPTVAYSVLVVAKVEKGKSKKLKSVKELLGITIMERSSFEKNPIDFLEAKGYKEVKKDLIIKLPKYSLFELENGRKRMLASAGELQKGNELALPSKYVNFLYLASHYEKLKGSPEDNEQKQLFVEQHKHYLDEIIEQISEFSKRVILADANLDKVLSAYNKHRDKPIREQAENIIHLFTLTNLGAPAAFKYFDTTIDRKRYTSTKEVLDATLIHQSITGLYETRIDLSQLGGDGSGSPKKKRKVDGSPKKKRKVDSG

SEQ ID NO: 226 - RNA, 4179 nt, Artificial Sequence
  Synthetic: Cas9 nickase mRNA ORF encoding SEQ ID NO: 25 using minimal uridine codons as listed in Table 3, with start and stop codons
auggacaagaaguacagcaucggacuggcaaucggaacaaacagcgucggaugggcagucaucacagacgaauacaaggucccgagcaagaaguucaagguccugggaaacacagacagacacagcaucaagaagaaccugaucggagcacugcuguucgacagcggagaaacagcagaagcaacaagacugaagagaacagcaagaagaagauacacaagaagaaagaacagaaucugcuaccugcaggaaaucuucagcaacgaaauggcaaaggucgacgacagcuucuuccacagacuggaagaaagcuuccuggucgaagaagacaagaagcacgaaagacacccgaucuucggaaacaucgucgacgaagucgcauaccacgaaaaguacccgacaaucuaccaccugagaaagaagcuggucgacagcacagacaaggcagaccugagacugaucuaccuggcacuggcacacaugaucaaguucagaggacacuuccugaucgaaggagaccugaacccggacaacagcgacgucgacaagcuguucauccagcugguccagacauacaaccagcuguucgaagaaaacccgaucaacgcaagcggagucgacgcaaaggcaauccugagcgcaagacugagcaagagcagaagacuggaaaaccugaucgcacagcugccgggagaaaagaagaacggacuguucggaaaccugaucgcacugagccugggacugacaccgaacuucaagagcaacuucgaccuggcagaagacgcaaagcugcagcugagcaaggacacauacgacgacgaccuggacaaccugcuggcacagaucggagaccaguacgcagaccuguuccuggcagcaaagaaccugagcgacgcaauccugcugagcgacauccugagagucaacacagaaaucacaaaggcaccgcugagcgcaagcaugaucaagagauacgacgaacaccaccaggaccugacacugcugaaggcacuggucagacagcagcugccggaaaaguacaaggaaaucuucuucgaccagagcaagaacggauacgcaggauacaucgacggaggagcaagccaggaagaauucuacaaguucaucaagccgauccuggaaaagauggacggaacagaagaacugcuggucaagcugaacagagaagaccugcugagaaagcagagaacauucgacaacggaagcaucccgcaccagauccaccugggagaacugcacgcaauccugagaagacaggaagacuucuacccguuccugaaggacaacagagaaaagaucgaaaagauccugacauucagaaucccguacuacgucggaccgcuggcaagaggaaacagcagauucgcauggaugacaagaaagagcgaagaaacaaucacaccguggaacuucgaagaagucgucgacaagggagcaagcgcacagagcuucaucgaaagaaugacaaacuucgacaagaaccugccgaacgaaaagguccugccgaagcacagccugcuguacgaauacuucacagucuacaacgaacugacaaaggucaaguacgucacagaaggaaugagaaagccggcauuccugagcggagaacagaagaaggcaaucgucgaccugcuguucaagacaaacagaaaggucacagucaagcagcugaaggaagacuacuucaagaagaucgaaugcuucgacagcgucgaaaucagcggagucgaagacagauucaacgcaagccugggaacauaccacgaccugcugaagaucaucaaggacaaggacuuccuggacaacgaagaaaacgaagacauccuggaagacaucguccugacacugacacuguucgaagacagagaaaugaucgaagaaagacugaagacauacgcacaccuguucgacgacaaggucaugaagcagcugaagagaagaagauacacaggauggggaagacugagcagaaagcugaucaacggaaucagagacaagcagagcggaaagacaauccuggacuuccugaagagcgacggauucgcaaacagaaacuucaugcagcugauccacgacgacagccugacauucaaggaagacauccagaaggcacaggucagcggacagggagacagccugcacgaacacaucgcaaaccuggcaggaagcccggcaaucaagaagggaauccugcagacagucaaggucgucgacgaacuggucaaggucaugggaagacacaagccggaaaacaucgucaucgaaauggcaagagaaaaccagacaacacagaagggacagaagaacagcagagaaagaaugaagagaaucgaagaaggaaucaaggaacugggaagccagauccugaaggaacacccggucgaaaacacacagcugcagaacgaaaagcuguaccuguacuaccugcagaacggaagagacauguacgucgaccaggaacuggacaucaacagacugagcgacuacgacgucgaccacaucgucccgcagagcuuccugaaggacgacagcaucgacaacaagguccugacaagaagcgacaagaacagaggaaagagcgacaacgucccgagcgaagaagucgucaagaagaugaagaacuacuggagacagcugcugaacgcaaagcugaucacacagagaaaguucgacaaccugacaaaggcagagagaggaggacugagcgaacuggacaaggcaggauucaucaagagacagcuggucgaaacaagacagaucacaaagcacgucgcacagauccuggacagcagaaugaacacaaaguacgacgaaaacgacaagcugaucagagaagucaaggucaucacacugaagagcaagcuggucagcgacuucagaaaggacuuccaguucuacaaggucagagaaaucaacaacuaccaccacgcacacgacgcauaccugaacgcagucgucggaacagcacugaucaagaaguacccgaagcuggaaagcgaauucgucuacggagacuacaaggucuacgacgucagaaagaugaucgcaaagagcgaacaggaaaucggaaaggcaacagcaaaguacuucuucuacagcaacaucaugaacuucuucaagacagaaaucacacuggcaaacggagaaaucagaaagagaccgcugaucgaaacaaacggagaaacaggagaaaucgucugggacaagggaagagacuucgcaacagucagaaagguccugagcaugccgcaggucaacaucgucaagaagacagaaguccagacaggaggauucagcaaggaaagcauccugccgaagagaaacagcgacaagcugaucgcaagaaagaaggacugggacccgaagaaguacggaggauucgacagcccgacagucgcauacagcguccuggucgucgcaaaggucgaaaagggaaagagcaagaagcugaagagcgucaaggaacugcugggaaucacaaucauggaaagaagcagcuucgaaaagaacccgaucgacuuccuggaagcaaagggauacaaggaagucaagaaggaccugaucaucaagcugccgaaguacagccuguucgaacuggaaaacggaagaaagagaaugcuggcaagcgcaggagaacugcagaagggaaacgaacuggcacugccgagcaaguacgucaacuuccuguaccuggcaagccacuacgaaaagcugaagggaagcccggaagacaacgaacagaagcagcuguucgucgaacagcacaagcacuaccuggacgaaaucaucgaacagaucagcgaauucagcaagagagucauccuggcagacgcaaaccuggacaagguccugagcgcauacaacaagcacagagacaagccgaucagagaacaggcagaaaacaucauccaccuguucacacugacaaaccugggagcaccggcagcauucaaguacuucgacacaacaaucgacagaaagagauacacaagcacaaaggaaguccuggacgcaacacugauccaccagagcaucacaggacuguacgaaacaagaaucgaccugagccagcugggaggagacggaagcggaagcccgaagaagaagagaaaggucgacggaagcccgaagaagaagagaaaggucgacagcggauag

SEQ ID NO: 227 - RNA, 4173 nt, Artificial Sequence
  Synthetic: Cas9 nickase coding sequence encoding SEQ ID NO: 25 using minimal uridine codons as listed in Table 3 (no start or stop codons; suitable for inclusion in fusion protein coding sequence)
gacaagaaguacagcaucggacuggcaaucggaacaaacagcgucggaugggcagucaucacagacgaauacaaggucccgagcaagaaguucaagguccugggaaacacagacagacacagcaucaagaagaaccugaucggagcacugcuguucgacagcggagaaacagcagaagcaacaagacugaagagaacagcaagaagaagauacacaagaagaaagaacagaaucugcuaccugcaggaaaucuucagcaacgaaauggcaaaggucgacgacagcuucuuccacagacuggaagaaagcuuccuggucgaagaagacaagaagcacgaaagacacccgaucuucggaaacaucgucgacgaagucgcauaccacgaaaaguacccgacaaucuaccaccugagaaagaagcuggucgacagcacagacaaggcagaccugagacugaucuaccuggcacuggcacacaugaucaaguucagaggacacuuccugaucgaaggagaccugaacccggacaacagcgacgucgacaagcuguucauccagcugguccagacauacaaccagcuguucgaagaaaacccgaucaacgcaagcggagucgacgcaaaggcaauccugagcgcaagacugagcaagagcagaagacuggaaaaccugaucgcacagcugccgggagaaaagaagaacggacuguucggaaaccugaucgcacugagccugggacugacaccgaacuucaagagcaacuucgaccuggcagaagacgcaaagcugcagcugagcaaggacacauacgacgacgaccuggacaaccugcuggcacagaucggagaccaguacgcagaccuguuccuggcagcaaagaaccugagcgacgcaauccugcugagcgacauccugagagucaacacagaaaucacaaaggcaccgcugagcgcaagcaugaucaagagauacgacgaacaccaccaggaccugacacugcugaaggcacuggucagacagcagcugccggaaaaguacaaggaaaucuucuucgaccagagcaagaacggauacgcaggauacaucgacggaggagcaagccaggaagaauucuacaaguucaucaagccgauccuggaaaagauggacggaacagaagaacugcuggucaagcugaacagagaagaccugcugagaaagcagagaacauucgacaacggaagcaucccgcaccagauccaccugggagaacugcacgcaauccugagaagacaggaagacuucuacccguuccugaaggacaacagagaaaagaucgaaaagauccugacauucagaaucccguacuacgucggaccgcuggcaagaggaaacagcagauucgcauggaugacaagaaagagcgaagaaacaaucacaccguggaacuucgaagaagucgucgacaagggagcaagcgcacagagcuucaucgaaagaaugacaaacuucgacaagaaccugccgaacgaaaagguccugccgaagcacagccugcuguacgaauacuucacagucuacaacgaacugacaaaggucaaguacgucacagaaggaaugagaaagccggcauuccugagcggagaacagaagaaggcaaucgucgaccugcuguucaagacaaacagaaaggucacagucaagcagcugaaggaagacuacuucaagaagaucgaaugcuucgacagcgucgaaaucagcggagucgaagacagauucaacgcaagccugggaacauaccacgaccugcugaagaucaucaaggacaaggacuuccuggacaacgaagaaaacgaagacauccuggaagacaucguccugacacugacacuguucgaagacagagaaaugaucgaagaaagacugaagacauacgcacaccuguucgacgacaaggucaugaagcagcugaagagaagaagauacacaggauggggaagacugagcagaaagcugaucaacggaaucagagacaagcagagcggaaagacaauccuggacuuccugaagagcgacggauucgcaaacagaaacuucaugcagcugauccacgacgacagccugacauucaaggaagacauccagaaggcacaggucagcggacagggagacagccugcacgaacacaucgcaaaccuggcaggaagcccggcaaucaagaagggaauccugcagacagucaaggucgucgacgaacuggucaaggucaugggaagacacaagccggaaaacaucgucaucgaaauggcaagagaaaaccagacaacacagaagggacagaagaacagcagagaaagaaugaagagaaucgaagaaggaaucaaggaacugggaagccagauccugaaggaacacccggucgaaaacacacagcugcagaacgaaaagcuguaccuguacuaccugcagaacggaagagacauguacgucgaccaggaacuggacaucaacagacugagcgacuacgacgucgaccacaucgucccgcagagcuuccugaaggacgacagcaucgacaacaagguccugacaagaagcgacaagaacagaggaaagagcgacaacgucccgagcgaagaagucgucaagaagaugaagaacuacuggagacagcugcugaacgcaaagcugaucacacagagaaaguucgacaaccugacaaaggcagagagaggaggacugagcgaacuggacaaggcaggauucaucaagagacagcuggucgaaacaagacagaucacaaagcacgucgcacagauccuggacagcagaaugaacacaaaguacgacgaaaacgacaagcugaucagagaagucaaggucaucacacugaagagcaagcuggucagcgacuucagaaaggacuuccaguucuacaaggucagagaaaucaacaacuaccaccacgcacacgacgcauaccugaacgcagucgucggaacagcacugaucaagaaguacccgaagcuggaaagcgaauucgucuacggagacuacaaggucuacgacgucagaaagaugaucgcaaagagcgaacaggaaaucggaaaggcaacagcaaaguacuucuucuacagcaacaucaugaacuucuucaagacagaaaucacacuggcaaacggagaaaucagaaagagaccgcugaucgaaacaaacggagaaacaggagaaaucgucugggacaagggaagagacuucgcaacagucagaaagguccugagcaugccgcaggucaacaucgucaagaagacagaaguccagacaggaggauucagcaaggaaagcauccugccgaagagaaacagcgacaagcugaucgcaagaaagaaggacugggacccgaagaaguacggaggauucgacagcccgacagucgcauacagcguccuggucgucgcaaaggucgaaaagggaaagagcaagaagcugaagagcgucaaggaacugcugggaaucacaaucauggaaagaagcagcuucgaaaagaacccgaucgacuuccuggaagcaaagggauacaaggaagucaagaaggaccugaucaucaagcugccgaaguacagccuguucgaacuggaaaacggaagaaagagaaugcuggcaagcgcaggagaacugcagaagggaaacgaacuggcacugccgagcaaguacgucaacuuccuguaccuggcaagccacuacgaaaagcugaagggaagcccggaagacaacgaacagaagcagcuguucgucgaacagcacaagcacuaccuggacgaaaucaucgaacagaucagcgaauucagcaagagagucauccuggcagacgcaaaccuggacaagguccugagcgcauacaacaagcacagagacaagccgaucagagaacaggcagaaaacaucauccaccuguucacacugacaaaccugggagcaccggcagcauucaaguacuucgacacaacaaucgacagaaagagauacacaagcacaaaggaaguccuggacgcaacacugauccaccagagcaucacaggacuguacgaaacaagaaucgaccugagccagcugggaggagacggaagcggaagcccgaagaagaagagaaaggucgacggaagcccgaagaagaagagaaaggucgacagcgga

SEQ ID NO: 228 - protein, 1392 aa, Artificial Sequence
  Synthetic: Amino acid sequence of dCas9 with two nuclear localization signals as the C-terminal amino acids
MDKKYSIGLAIGTNSVGWAVITDEYKVPSKKFKVLGNTDRHSIKKNLIGALLFDSGETAEATRLKRTARRRYTRRKNRICYLQEIFSNEMAKVDDSFFHRLEESFLVEEDKKHERHPIFGNIVDEVAYHEKYPTIYHLRKKLVDSTDKADLRLIYLALAHMIKFRGHFLIEGDLNPDNSDVDKLFIQLVQTYNQLFEENPINASGVDAKAILSARLSKSRRLENLIAQLPGEKKNGLFGNLIALSLGLTPNFKSNFDLAEDAKLQLSKDTYDDDLDNLLAQIGDQYADLFLAAKNLSDAILLSDILRVNTEITKAPLSASMIKRYDEHHQDLTLLKALVRQQLPEKYKEIFFDQSKNGYAGYIDGGASQEEFYKFIKPILEKMDGTEELLVKLNREDLLRKQRTFDNGSIPHQIHLGELHAILRRQEDFYPFLKDNREKIEKILTFRIPYYVGPLARGNSRFAWMTRKSEETITPWNFEEVVDKGASAQSFIERMTNFDKNLPNEKVLPKHSLLYEYFTVYNELTKVKYVTEGMRKPAFLSGEQKKAIVDLLFKTNRKVTVKQLKEDYFKKIECFDSVEISGVEDRFNASLGTYHDLLKIIKDKDFLDNEENEDILEDIVLTLTLFEDREMIEERLKTYAHLFDDKVMKQLKRRRYTGWGRLSRKLINGIRDKQSGKTILDFLKSDGFANRNFMQLIHDDSLTFKEDIQKAQVSGQGDSLHEHIANLAGSPAIKKGILQTVKVVDELVKVMGRHKPENIVIEMARENQTTQKGQKNSRERMKRIEEGIKELGSQILKEHPVENTQLQNEKLYLYYLQNGRDMYVDQELDINRLSDYDVDAIVPQSFLKDDSIDNKVLTRSDKNRGKSDNVPSEEVVKKMKNYWRQLLNAKLITQRKFDNLTKAERGGLSELDKAGFIKRQLVETRQITKHVAQILDSRMNTKYDENDKLIREVKVITLKSKLVSDFRKDFQFYKVREINNYHHAHDAYLNAVVGTALIKKYPKLESEFVYGDYKVYDVRKMIAKSEQEIGKATAKYFFYSNIMNFFKTEITLANGEIRKRPLIETNGETGEIVWDKGRDFATVRKVLSMPQVNIVKKTEVQTGGFSKESILPKRNSDKLIARKKDWDPKKYGGFDSPTVAYSVLVVAKVEKGKSKKLKSVKELLGITIMERSSFEKNPIDFLEAKGYKEVKKDLIIKLPKYSLFELENGRKRMLASAGELQKGNELALPSKYVNFLYLASHYEKLKGSPEDNEQKQLFVEQHKHYLDEIIEQISEFSKRVILADANLDKVLSAYNKHRDKPIREQAENIIHLFTLTNLGAPAAFKYFDTTIDRKRYTSTKEVLDATLIHQSITGLYETRIDLSQLGGDGSGSPKKKRKVDGSPKKKRKVDSG

SEQ ID NO: 229 - RNA, 4179 nt, Artificial Sequence
  Synthetic: dCas9 mRNA ORF encoding SEQ ID NO: 28 using minimal uridine codons as listed in Table 3, with start and stop codons
auggacaagaaguacagcaucggacuggcaaucggaacaaacagcgucggaugggcagucaucacagacgaauacaaggucccgagcaagaaguucaagguccugggaaacacagacagacacagcaucaagaagaaccugaucggagcacugcuguucgacagcggagaaacagcagaagcaacaagacugaagagaacagcaagaagaagauacacaagaagaaagaacagaaucugcuaccugcaggaaaucuucagcaacgaaauggcaaaggucgacgacagcuucuuccacagacuggaagaaagcuuccuggucgaagaagacaagaagcacgaaagacacccgaucuucggaaacaucgucgacgaagucgcauaccacgaaaaguacccgacaaucuaccaccugagaaagaagcuggucgacagcacagacaaggcagaccugagacugaucuaccuggcacuggcacacaugaucaaguucagaggacacuuccugaucgaaggagaccugaacccggacaacagcgacgucgacaagcuguucauccagcugguccagacauacaaccagcuguucgaagaaaacccgaucaacgcaagcggagucgacgcaaaggcaauccugagcgcaagacugagcaagagcagaagacuggaaaaccugaucgcacagcugccgggagaaaagaagaacggacuguucggaaaccugaucgcacugagccugggacugacaccgaacuucaagagcaacuucgaccuggcagaagacgcaaagcugcagcugagcaaggacacauacgacgacgaccuggacaaccugcuggcacagaucggagaccaguacgcagaccuguuccuggcagcaaagaaccugagcgacgcaauccugcugagcgacauccugagagucaacacagaaaucacaaaggcaccgcugagcgcaagcaugaucaagagauacgacgaacaccaccaggaccugacacugcugaaggcacuggucagacagcagcugccggaaaaguacaaggaaaucuucuucgaccagagcaagaacggauacgcaggauacaucgacggaggagcaagccaggaagaauucuacaaguucaucaagccgauccuggaaaagauggacggaacagaagaacugcuggucaagcugaacagagaagaccugcugagaaagcagagaacauucgacaacggaagcaucccgcaccagauccaccugggagaacugcacgcaauccugagaagacaggaagacuucuacccguuccugaaggacaacagagaaaagaucgaaaagauccugacauucagaaucccguacuacgucggaccgcuggcaagaggaaacagcagauucgcauggaugacaagaaagagcgaagaaacaaucacaccguggaacuucgaagaagucgucgacaagggagcaagcgcacagagcuucaucgaaagaaugacaaacuucgacaagaaccugccgaacgaaaagguccugccgaagcacagccugcuguacgaauacuucacagucuacaacgaacugacaaaggucaaguacgucacagaaggaaugagaaagccggcauuccugagcggagaacagaagaaggcaaucgucgaccugcuguucaagacaaacagaaaggucacagucaagcagcugaaggaagacuacuucaagaagaucgaaugcuucgacagcgucgaaaucagcggagucgaagacagauucaacgcaagccugggaacauaccacgaccugcugaagaucaucaaggacaaggacuuccuggacaacgaagaaaacgaagacauccuggaagacaucguccugacacugacacuguucgaagacagagaaaugaucgaagaaagacugaagacauacgcacaccuguucgacgacaaggucaugaagcagcugaagagaagaagauacacaggauggggaagacugagcagaaagcugaucaacggaaucagagacaagcagagcggaaagacaauccuggacuuccugaagagcgacggauucgcaaacagaaacuucaugcagcugauccacgacgacagccugacauucaaggaagacauccagaaggcacaggucagcggacagggagacagccugcacgaacacaucgcaaaccuggcaggaagcccggcaaucaagaagggaauccugcagacagucaaggucgucgacgaacuggucaaggucaugggaagacacaagccggaaaacaucgucaucgaaauggcaagagaaaaccagacaacacagaagggacagaagaacagcagagaaagaaugaagagaaucgaagaaggaaucaaggaacugggaagccagauccugaaggaacacccggucgaaaacacacagcugcagaacgaaaagcuguaccuguacuaccugcagaacggaagagacauguacgucgaccaggaacuggacaucaacagacugagcgacuacgacgucgacgcaaucgucccgcagagcuuccugaaggacgacagcaucgacaacaagguccugacaagaagcgacaagaacagaggaaagagcgacaacgucccgagcgaagaagucgucaagaagaugaagaacuacuggagacagcugcugaacgcaaagcugaucacacagagaaaguucgacaaccugacaaaggcagagagaggaggacugagcgaacuggacaaggcaggauucaucaagagacagcuggucgaaacaagacagaucacaaagcacgucgcacagauccuggacagcagaaugaacacaaaguacgacgaaaacgacaagcugaucagagaagucaaggucaucacacugaagagcaagcuggucagcgacuucagaaaggacuuccaguucuacaaggucagagaaaucaacaacuaccaccacgcacacgacgcauaccugaacgcagucgucggaacagcacugaucaagaaguacccgaagcuggaaagcgaauucgucuacggagacuacaaggucuacgacgucagaaagaugaucgcaaagagcgaacaggaaaucggaaaggcaacagcaaaguacuucuucuacagcaacaucaugaacuucuucaagacagaaaucacacuggcaaacggagaaaucagaaagagaccgcugaucgaaacaaacggagaaacaggagaaaucgucugggacaagggaagagacuucgcaacagucagaaagguccugagcaugccgcaggucaacaucgucaagaagacagaaguccagacaggaggauucagcaaggaaagcauccugccgaagagaaacagcgacaagcugaucgcaagaaagaaggacugggacccgaagaaguacggaggauucgacagcccgacagucgcauacagcguccuggucgucgcaaaggucgaaaagggaaagagcaagaagcugaagagcgucaaggaacugcugggaaucacaaucauggaaagaagcagcuucgaaaagaacccgaucgacuuccuggaagcaaagggauacaaggaagucaagaaggaccugaucaucaagcugccgaaguacagccuguucgaacuggaaaacggaagaaagagaaugcuggcaagcgcaggagaacugcagaagggaaacgaacuggcacugccgagcaaguacgucaacuuccuguaccuggcaagccacuacgaaaagcugaagggaagcccggaagacaacgaacagaagcagcuguucgucgaacagcacaagcacuaccuggacgaaaucaucgaacagaucagcgaauucagcaagagagucauccuggcagacgcaaaccuggacaagguccugagcgcauacaacaagcacagagacaagccgaucagagaacaggcagaaaacaucauccaccuguucacacugacaaaccugggagcaccggcagcauucaaguacuucgacacaacaaucgacagaaagagauacacaagcacaaaggaaguccuggacgcaacacugauccaccagagcaucacaggacuguacgaaacaagaaucgaccugagccagcugggaggagacggaagcggaagcccgaagaagaagagaaaggucgacggaagcccgaagaagaagagaaaggucgacagcggauag

SEQ ID NO: 230 - RNA, 4173 nt, Artificial Sequence
  Synthetic: dCas9 coding sequence encoding SEQ ID NO: 28 using minimal uridine codons as listed in Table 3 (no start or stop codons; suitable for inclusion in fusion protein coding sequence)
gacaagaaguacagcaucggacuggcaaucggaacaaacagcgucggaugggcagucaucacagacgaauacaaggucccgagcaagaaguucaagguccugggaaacacagacagacacagcaucaagaagaaccugaucggagcacugcuguucgacagcggagaaacagcagaagcaacaagacugaagagaacagcaagaagaagauacacaagaagaaagaacagaaucugcuaccugcaggaaaucuucagcaacgaaauggcaaaggucgacgacagcuucuuccacagacuggaagaaagcuuccuggucgaagaagacaagaagcacgaaagacacccgaucuucggaaacaucgucgacgaagucgcauaccacgaaaaguacccgacaaucuaccaccugagaaagaagcuggucgacagcacagacaaggcagaccugagacugaucuaccuggcacuggcacacaugaucaaguucagaggacacuuccugaucgaaggagaccugaacccggacaacagcgacgucgacaagcuguucauccagcugguccagacauacaaccagcuguucgaagaaaacccgaucaacgcaagcggagucgacgcaaaggcaauccugagcgcaagacugagcaagagcagaagacuggaaaaccugaucgcacagcugccgggagaaaagaagaacggacuguucggaaaccugaucgcacugagccugggacugacaccgaacuucaagagcaacuucgaccuggcagaagacgcaaagcugcagcugagcaaggacacauacgacgacgaccuggacaaccugcuggcacagaucggagaccaguacgcagaccuguuccuggcagcaaagaaccugagcgacgcaauccugcugagcgacauccugagagucaacacagaaaucacaaaggcaccgcugagcgcaagcaugaucaagagauacgacgaacaccaccaggaccugacacugcugaaggcacuggucagacagcagcugccggaaaaguacaaggaaaucuucuucgaccagagcaagaacggauacgcaggauacaucgacggaggagcaagccaggaagaauucuacaaguucaucaagccgauccuggaaaagauggacggaacagaagaacugcuggucaagcugaacagagaagaccugcugagaaagcagagaacauucgacaacggaagcaucccgcaccagauccaccugggagaacugcacgcaauccugagaagacaggaagacuucuacccguuccugaaggacaacagagaaaagaucgaaaagauccugacauucagaaucccguacuacgucggaccgcuggcaagaggaaacagcagauucgcauggaugacaagaaagagcgaagaaacaaucacaccguggaacuucgaagaagucgucgacaagggagcaagcgcacagagcuucaucgaaagaaugacaaacuucgacaagaaccugccgaacgaaaagguccugccgaagcacagccugcuguacgaauacuucacagucuacaacgaacugacaaaggucaaguacgucacagaaggaaugagaaagccggcauuccugagcggagaacagaagaaggcaaucgucgaccugcuguucaagacaaacagaaaggucacagucaagcagcugaaggaagacuacuucaagaagaucgaaugcuucgacagcgucgaaaucagcggagucgaagacagauucaacgcaagccugggaacauaccacgaccugcugaagaucaucaaggacaaggacuuccuggacaacgaagaaaacgaagacauccuggaagacaucguccugacacugacacuguucgaagacagagaaaugaucgaagaaagacugaagacauacgcacaccuguucgacgacaaggucaugaagcagcugaagagaagaagauacacaggauggggaagacugagcagaaagcugaucaacggaaucagagacaagcagagcggaaagacaauccuggacuuccugaagagcgacggauucgcaaacagaaacuucaugcagcugauccacgacgacagccugacauucaaggaagacauccagaaggcacaggucagcggacagggagacagccugcacgaacacaucgcaaaccuggcaggaagcccggcaaucaagaagggaauccugcagacagucaaggucgucgacgaacuggucaaggucaugggaagacacaagccggaaaacaucgucaucgaaauggcaagagaaaaccagacaacacagaagggacagaagaacagcagagaaagaaugaagagaaucgaagaaggaaucaaggaacugggaagccagauccugaaggaacacccggucgaaaacacacagcugcagaacgaaaagcuguaccuguacuaccugcagaacggaagagacauguacgucgaccaggaacuggacaucaacagacugagcgacuacgacgucgacgcaaucgucccgcagagcuuccugaaggacgacagcaucgacaacaagguccugacaagaagcgacaagaacagaggaaagagcgacaacgucccgagcgaagaagucgucaagaagaugaagaacuacuggagacagcugcugaacgcaaagcugaucacacagagaaaguucgacaaccugacaaaggcagagagaggaggacugagcgaacuggacaaggcaggauucaucaagagacagcuggucgaaacaagacagaucacaaagcacgucgcacagauccuggacagcagaaugaacacaaaguacgacgaaaacgacaagcugaucagagaagucaaggucaucacacugaagagcaagcuggucagcgacuucagaaaggacuuccaguucuacaaggucagagaaaucaacaacuaccaccacgcacacgacgcauaccugaacgcagucgucggaacagcacugaucaagaaguacccgaagcuggaaagcgaauucgucuacggagacuacaaggucuacgacgucagaaagaugaucgcaaagagcgaacaggaaaucggaaaggcaacagcaaaguacuucuucuacagcaacaucaugaacuucuucaagacagaaaucacacuggcaaacggagaaaucagaaagagaccgcugaucgaaacaaacggagaaacaggagaaaucgucugggacaagggaagagacuucgcaacagucagaaagguccugagcaugccgcaggucaacaucgucaagaagacagaaguccagacaggaggauucagcaaggaaagcauccugccgaagagaaacagcgacaagcugaucgcaagaaagaaggacugggacccgaagaaguacggaggauucgacagcccgacagucgcauacagcguccuggucgucgcaaaggucgaaaagggaaagagcaagaagcugaagagcgucaaggaacugcugggaaucacaaucauggaaagaagcagcuucgaaaagaacccgaucgacuuccuggaagcaaagggauacaaggaagucaagaaggaccugaucaucaagcugccgaaguacagccuguucgaacuggaaaacggaagaaagagaaugcuggcaagcgcaggagaacugcagaagggaaacgaacuggcacugccgagcaaguacgucaacuuccuguaccuggcaagccacuacgaaaagcugaagggaagcccggaagacaacgaacagaagcagcuguucgucgaacagcacaagcacuaccuggacgaaaucaucgaacagaucagcgaauucagcaagagagucauccuggcagacgcaaaccuggacaagguccugagcgcauacaacaagcacagagacaagccgaucagagaacaggcagaaaacaucauccaccuguucacacugacaaaccugggagcaccggcagcauucaaguacuucgacacaacaaucgacagaaagagauacacaagcacaaaggaaguccuggacgcaacacugauccaccagagcaucacaggacuguacgaaacaagaaucgaccugagccagcugggaggagacggaagcggaagcccgaagaagaagagaaaggucgacggaagcccgaagaagaagagaaaggucgacagcgga

SEQ ID NO: 231 - DNA, 17 bp, Artificial Sequence
  Synthetic: T7 promoter
taatacgactcactata

SEQ ID NO: 232 - DNA, 50 bp, Artificial Sequence
  Synthetic: Human beta-globin 5 UTR
acatttgcttctgacacaactgtgttcactagcaacctcaaacagacacc

SEQ ID NO: 233 - DNA, 132 bp, Artificial Sequence
  Synthetic: Human beta-globin 3 UTR
gctcgctttcttgctgtccaatttctattaaaggttcctttgttccctaagtccaactactaaactgggggatattatgaagggccttgagcatctggattctgcctaataaaaaacatttattttcattgc

SEQ ID NO: 234 - DNA, 66 bp, Artificial Sequence
  Synthetic: Human alpha-globin 5 UTR
cataaaccctggcgcgctcgcggcccggcactcttctggtccccacagactcagagagaacccacc

SEQ ID NO: 235 - DNA, 110 bp, Artificial Sequence
  Synthetic: Human alpha-globin 3 UTR
gctggagcctcggtggccatgcttcttgccccttgggcctccccccagcccctcctccccttcctgcacccgtacccccgtggtctttgaataaagtctgagtgggcggc

SEQ ID NO: 236 - DNA, 29 bp, Artificial Sequence
  Synthetic: Xenopus laevis beta-globin 5 UTR
aagctcagaataaacgctcaactttggcc

SEQ ID NO: 237 - DNA, 130 bp, Artificial Sequence
  Synthetic: Xenopus laevis beta-globin 3 UTR
accagcctcaagaacacccgaatggagtctctaagctacataataccaacttacactttacaaaatgttgtcccccaaaatgtagccattcgtatctgctcctaataaaaagaaagtttcttcacattct

SEQ ID NO: 238 - DNA, 27 bp, Artificial Sequence
  Synthetic: Bovine Growth Hormone 5 UTR
cagggtcctgtggacagctcaccagct

SEQ ID NO: 239 - DNA, 102 bp, Artificial Sequence
  Synthetic: Bovine Growth Hormone 3 UTR
ttgccagccatctgttgtttgcccctcccccgtgccttccttgaccctggaaggtgccactcccactgtcctttcctaataaaatgaggaaattgcatcgca

SEQ ID NO: 240 - DNA, 93 bp, Artificial Sequence
  Synthetic: Mus musculus hemoglobin alpha, adult chain 1 (Hba-a1), 3UTR
gctgccttctgcggggcttgccttctggccatgcccttcttctctcccttgcacctgtacctcttggtctttgaataaagcctgagtaggaag

SEQ ID NO: 241 - DNA, 61 bp, Artificial Sequence
  Synthetic: HSD17B4 5 UTR
tcccgcagtcggcgtccagcggctctgcttgttcgtgtgtgtgtcgttgcaggccttattc

SEQ ID NO: 242 - RNA, 100 nt, Artificial Sequence; identical to SEQ ID NO: 124
  Synthetic: G282 guide RNA targeting TTR
  modified_base (1)..(3): 2'-O-Me nucleotide
  modified_base (1)..(4): PS linkage
  modified_base (29)..(40): 2'-O-Me nucleotide
  modified_base (69)..(100): 2'-O-Me nucleotide
  modified_base (97)..(100): PS linkage

SEQ ID NO: 243 - DNA, 4411 bp, Artificial Sequence; identical to SEQ ID NO: 1
  Synthetic: Cas9 transcript with 5 UTR of HSD, ORF corresponding to SEQ ID NO: 4, Kozak sequence, and 3 UTR of ALB

SEQ ID NO: 244 - DNA, 4405 bp, Artificial Sequence
  Synthetic: Cas9 transcript with 5 UTR of HSD, ORF corresponding to SEQ ID NO: 4, and 3 UTR of ALB
gggtcccgcagtcggcgtccagcggctctgcttgttcgtgtgtgtgtcgttgcaggccttattcggatccatggacaagaagtacagcatcggactggacatcggaacaaacagcgtcggatgggcagtcatcacagacgaatacaaggtcccgagcaagaagttcaaggtcctgggaaacacagacagacacagcatcaagaagaacctgatcggagcactgctgttcgacagcggagaaacagcagaagcaacaagactgaagagaacagcaagaagaagatacacaagaagaaagaacagaatctgctacctgcaggaaatcttcagcaacgaaatggcaaaggtcgacgacagcttcttccacagactggaagaaagcttcctggtcgaagaagacaagaagcacgaaagacacccgatcttcggaaacatcgtcgacgaagtcgcataccacgaaaagtacccgacaatctaccacctgagaaagaagctggtcgacagcacagacaaggcagacctgagactgatctacctggcactggcacacatgatcaagttcagaggacacttcctgatcgaaggagacctgaacccggacaacagcgacgtcgacaagctgttcatccagctggtccagacatacaaccagctgttcgaagaaaacccgatcaacgcaagcggagtcgacgcaaaggcaatcctgagcgcaagactgagcaagagcagaagactggaaaacctgatcgcacagctgccgggagaaaagaagaacggactgttcggaaacctgatcgcactgagcctgggactgacaccgaacttcaagagcaacttcgacctggcagaagacgcaaagctgcagctgagcaaggacacatacgacgacgacctggacaacctgctggcacagatcggagaccagtacgcagacctgttcctggcagcaaagaacctgagcgacgcaatcctgctgagcgacatcctgagagtcaacacagaaatcacaaaggcaccgctgagcgcaagcatgatcaagagatacgacgaacaccaccaggacctgacactgctgaaggcactggtcagacagcagctgccggaaaagtacaaggaaatcttcttcgaccagagcaagaacggatacgcaggatacatcgacggaggagcaagccaggaagaattctacaagttcatcaagccgatcctggaaaagatggacggaacagaagaactgctggtcaagctgaacagagaagacctgctgagaaagcagagaacattcgacaacggaagcatcccgcaccagatccacctgggagaactgcacgcaatcctgagaagacaggaagacttctacccgttcctgaaggacaacagagaaaagatcgaaaagatcctgacattcagaatcccgtactacgtcggaccgctggcaagaggaaacagcagattcgcatggatgacaagaaagagcgaagaaacaatcacaccgtggaacttcgaagaagtcgtcgacaagggagcaagcgcacagagcttcatcgaaagaatgacaaacttcgacaagaacctgccgaacgaaaaggtcctgccgaagcacagcctgctgtacgaatacttcacagtctacaacgaactgacaaaggtcaagtacgtcacagaaggaatgagaaagccggcattcctgagcggagaacagaagaaggcaatcgtcgacctgctgttcaagacaaacagaaaggtcacagtcaagcagctgaaggaagactacttcaagaagatcgaatgcttcgacagcgtcgaaatcagcggagtcgaagacagattcaacgcaagcctgggaacataccacgacctgctgaagatcatcaaggacaaggacttcctggacaacgaagaaaacgaagacatcctggaagacatcgtcctgacactgacactgttcgaagacagagaaatgatcgaagaaagactgaagacatacgcacacctgttcgacgacaaggtcatgaagcagctgaagagaagaagatacacaggatggggaagactgagcagaaagctgatcaacggaatcagagacaagcagagcggaaagacaatcctggacttcctgaagagcgacggattcgcaaacagaaacttcatgcagctgatccacgacgacagcctgacattcaaggaagacatccagaaggcacaggtcagcggacagggagacagcctgcacgaacacatcgcaaacctggcaggaagcccggcaatcaagaagggaatcctgcagacagtcaaggtcgtcgacgaactggtcaaggtcatgggaagacacaagccggaaaacatcgtcatcgaaatggcaagagaaaaccagacaacacagaagggacagaagaacagcagagaaagaatgaagagaatcgaagaaggaatcaaggaactgggaagccagatcctgaaggaacacccggtcgaaaacacacagctgcagaacgaaaagctgtacctgtactacctgcagaacggaagagacatgtacgtcgaccaggaactggacatcaacagactgagcgactacgacgtcgaccacatcgtcccgcagagcttcctgaaggacgacagcatcgacaacaaggtcctgacaagaagcgacaagaacagaggaaagagcgacaacgtcccgagcgaagaagtcgtcaagaagatgaagaactactggagacagctgctgaacgcaaagctgatcacacagagaaagttcgacaacctgacaaaggcagagagaggaggactgagcgaactggacaaggcaggattcatcaagagacagctggtcgaaacaagacagatcacaaagcacgtcgcacagatcctggacagcagaatgaacacaaagtacgacgaaaacgacaagctgatcagagaagtcaaggtcatcacactgaagagcaagctggtcagcgacttcagaaaggacttccagttctacaaggtcagagaaatcaacaactaccaccacgcacacgacgcatacctgaacgcagtcgtcggaacagcactgatcaagaagtacccgaagctggaaagcgaattcgtctacggagactacaaggtctacgacgtcagaaagatgatcgcaaagagcgaacaggaaatcggaaaggcaacagcaaagtacttcttctacagcaacatcatgaacttcttcaagacagaaatcacactggcaaacggagaaatcagaaagagaccgctgatcgaaacaaacggagaaacaggagaaatcgtctgggacaagggaagagacttcgcaacagtcagaaaggtcctgagcatgccgcaggtcaacatcgtcaagaagacagaagtccagacaggaggattcagcaaggaaagcatcctgccgaagagaaacagcgacaagctgatcgcaagaaagaaggactgggacccgaagaagtacggaggattcgacagcccgacagtcgcatacagcgtcctggtcgtcgcaaaggtcgaaaagggaaagagcaagaagctgaagagcgtcaaggaactgctgggaatcacaatcatggaaagaagcagcttcgaaaagaacccgatcgacttcctggaagcaaagggatacaaggaagtcaagaaggacctgatcatcaagctgccgaagtacagcctgttcgaactggaaaacggaagaaagagaatgctggcaagcgcaggagaactgcagaagggaaacgaactggcactgccgagcaagtacgtcaacttcctgtacctggcaagccactacgaaaagctgaagggaagcccggaagacaacgaacagaagcagctgttcgtcgaacagcacaagcactacctggacgaaatcatcgaacagatcagcgaattcagcaagagagtcatcctggcagacgcaaacctggacaaggtcctgagcgcatacaacaagcacagagacaagccgatcagagaacaggcagaaaacatcatccacctgttcacactgacaaacctgggagcaccggcagcattcaagtacttcgacacaacaatcgacagaaagagatacacaagcacaaaggaagtcctggacgcaacactgatccaccagagcatcacaggactgtacgaaacaagaatcgacctgagccagctgggaggagacggaggaggaagcccgaagaagaagagaaaggtctagctagccatcacatttaaaagcatctcagcctaccatgagaataagagaaagaaaatgaagatcaatagcttattcatctctttttctttttcgttggtgtaaagccaacaccctgtctaaaaaacataaatttctttaatcattttgcctcttttctctgtgcttcaattaataaaaaatggaaagaacctcgag

SEQ ID NO: 245-249 - skipped (5 entries)

SEQ ID NO: 250 - DNA, 4140 bp, Artificial Sequence
  Synthetic: Cas9 ORF with splice junctions removed; 12.75% U content
atggacaagaagtacagcatcggactggacatcggaacaaacagcgtcggatgggcagtcatcacagacgaatacaaggtcccgagcaagaagttcaaggtcctgggaaacacagacagacacagcatcaagaagaacctgatcggagcactgctgttcgacagcggagaaacagcagaagcaacaagactgaagagaacagcaagaagaagatacacaagaagaaagaacagaatctgctacctgcaggaaatcttcagcaacgaaatggcaaaggtcgacgacagcttcttccaccggctggaagaaagcttcctggtcgaagaagacaagaagcacgaaagacacccgatcttcggaaacatcgtcgacgaagtcgcataccacgaaaagtacccgacaatctaccacctgagaaagaagctggtcgacagcacagacaaggcagacctgagactgatctacctggcactggcacacatgatcaagttcagaggacacttcctgatcgaaggagacctgaacccggacaacagcgacgtcgacaagctgttcatccagctggtccagacatacaaccagctgttcgaagaaaacccgatcaacgcaagcggagtcgacgcaaaggcaatcctgagcgcaagactgagcaagagcagaagactggaaaacctgatcgcacagctgccgggagaaaagaagaacggactgttcggaaacctgatcgcactgagcctgggactgacaccgaacttcaagagcaacttcgacctggcagaagacgcaaagctgcagctgagcaaggacacatacgacgacgacctggacaacctgctggcacagatcggagaccagtacgcagacctgttcctggcagcaaagaacctgagcgacgcaatcctgctgagcgacatcctgagagtcaacacagaaatcacaaaggcaccgctgagcgcaagcatgatcaagagatacgacgaacaccaccaggacctgacactgctgaaggcactggtcagacagcagctgccggaaaagtacaaggaaatcttcttcgaccagagcaagaacggatacgcaggatacatcgacggaggagcaagccaggaagaattctacaagttcatcaagccgatcctggaaaagatggacggaacagaagaactgctggtcaagctgaacagagaagacctgctgagaaagcagagaacattcgacaacggaagcatcccgcaccagatccacctgggagaactgcacgcaatcctgagaagacaggaagacttctacccgttcctgaaggacaacagagaaaagatcgaaaagatcctgacattcagaatcccgtactacgtcggaccgctggcaagaggaaacagcagattcgcatggatgacaagaaagagcgaagaaacaatcacaccgtggaacttcgaagaagtcgtcgacaagggagcaagcgcacagagcttcatcgaaagaatgacaaacttcgacaagaacctgccgaacgaaaaggtcctgccgaagcacagcctgctgtacgaatacttcacagtctacaacgaactgacaaaggtcaagtacgtcacagaaggaatgagaaagccggcattcctgagcggagaacagaagaaggcaatcgtcgacctgctgttcaagacaaacagaaaggtcacagtcaagcagctgaaggaagactacttcaagaagatcgaatgcttcgacagcgtcgaaatcagcggagtcgaagacagattcaacgcaagcctgggaacataccacgacctgctgaagatcatcaaggacaaggacttcctggacaacgaagaaaacgaagacatcctggaagacatcgtcctgacactgacactgttcgaagacagagaaatgatcgaagaaagactgaagacatacgcacacctgttcgacgacaaggtcatgaagcagctgaagagaagaagatacacaggatggggaagactgagcagaaagctgatcaacggaatcagagacaagcagagcggaaagacaatcctggacttcctgaagagcgacggattcgcaaacagaaacttcatgcagctgatccacgacgacagcctgacattcaaggaagacatccagaaggcacaggtcagcggacagggagacagcctgcacgaacacatcgcaaacctggcaggaagcccggcaatcaagaagggaatcctgcagacagtcaaggtcgtcgacgaactggtcaaggtcatgggaagacacaagccggaaaacatcgtcatcgaaatggcaagagaaaaccagacaacacagaagggacagaagaacagcagagaaagaatgaagagaatcgaagaaggaatcaaggaactgggaagccagatcctgaaggaacacccggtcgaaaacacacagctgcagaacgaaaagctgtacctgtactacctgcaaaacggaagagacatgtacgtcgaccaggaactggacatcaacagactgagcgactacgacgtcgaccacatcgtcccgcagagcttcctgaaggacgacagcatcgacaacaaggtcctgacaagaagcgacaagaacagaggaaagagcgacaacgtcccgagcgaagaagtcgtcaagaagatgaagaactactggagacagctgctgaacgcaaagctgatcacacagagaaagttcgacaacctgacaaaggcagagagaggaggactgagcgaactggacaaggcaggattcatcaagagacagctggtcgaaacaagacagatcacaaagcacgtcgcacagatcctggacagcagaatgaacacaaagtacgacgaaaacgacaagctgatcagagaagtcaaggtcatcacactgaagagcaagctggtcagcgacttcagaaaggacttccagttctacaaggtcagagaaatcaacaactaccaccacgcacacgacgcatacctgaacgcagtcgtcggaacagcactgatcaagaagtacccgaagctggaaagcgaattcgtctacggagactacaaggtctacgacgtcagaaagatgatcgcaaagagcgaacaggaaatcggaaaggcaacagcaaagtacttcttctacagcaacatcatgaacttcttcaagacagaaatcacactggcaaacggagaaatcagaaagagaccgctgatcgaaacaaacggagaaacaggagaaatcgtctgggacaagggaagagacttcgcaacagtcagaaaggtcctgagcatgccgcaggtcaacatcgtcaagaagacagaagtccagacaggaggattcagcaaggaaagcatcctgccgaagagaaacagcgacaagctgatcgcaagaaagaaggactgggacccgaagaagtacggaggattcgacagcccgacagtcgcatacagcgtcctggtcgtcgcaaaggtcgaaaagggaaagagcaagaagctgaagagcgtcaaggaactgctgggaatcacaatcatggaaagaagcagcttcgaaaagaacccgatcgacttcctggaagcaaagggatacaaggaagtcaagaaggacctgatcatcaagctgccgaagtacagcctgttcgaactggaaaacggaagaaagagaatgctggcaagcgcaggagaactgcagaagggaaacgaactggcactgccgagcaagtacgtcaacttcctgtacctggcaagccactacgaaaagctgaagggaagcccggaagacaacgaacagaagcagctgttcgtcgaacagcacaagcactacctggacgaaatcatcgaacagatcagcgaattcagcaagagagtcatcctggcagacgcaaacctggacaaggtcctgagcgcatacaacaagcacagagacaagccgatcagagaacaggcagaaaacatcatccacctgttcacactgacaaacctgggagcaccggcagcattcaagtacttcgacacaacaatcgacagaaagagatacacaagcacaaaggaagtcctggacgcaacactgatccaccagagcatcacaggactgtacgaaacaagaatcgacctgagccagctgggaggagacggaggaggaagcccgaagaagaagagaaaggtctag

SEQ ID NO: 251 - DNA, 4411 bp, Artificial Sequence
  Synthetic: Cas9 transcript with 5 UTR of HSD, ORF corresponding to SEQ ID NO: 50, Kozak sequence, and 3 UTR of ALB
gggtcccgcagtcggcgtccagcggctctgcttgttcgtgtgtgtgtcgttgcaggccttattcggatccgccaccatggacaagaagtacagcatcggactggacatcggaacaaacagcgtcggatgggcagtcatcacagacgaatacaaggtcccgagcaagaagttcaaggtcctgggaaacacagacagacacagcatcaagaagaacctgatcggagcactgctgttcgacagcggagaaacagcagaagcaacaagactgaagagaacagcaagaagaagatacacaagaagaaagaacagaatctgctacctgcaggaaatcttcagcaacgaaatggcaaaggtcgacgacagcttcttccaccggctggaagaaagcttcctggtcgaagaagacaagaagcacgaaagacacccgatcttcggaaacatcgtcgacgaagtcgcataccacgaaaagtacccgacaatctaccacctgagaaagaagctggtcgacagcacagacaaggcagacctgagactgatctacctggcactggcacacatgatcaagttcagaggacacttcctgatcgaaggagacctgaacccggacaacagcgacgtcgacaagctgttcatccagctggtccagacatacaaccagctgttcgaagaaaacccgatcaacgcaagcggagtcgacgcaaaggcaatcctgagcgcaagactgagcaagagcagaagactggaaaacctgatcgcacagctgccgggagaaaagaagaacggactgttcggaaacctgatcgcactgagcctgggactgacaccgaacttcaagagcaacttcgacctggcagaagacgcaaagctgcagctgagcaaggacacatacgacgacgacctggacaacctgctggcacagatcggagaccagtacgcagacctgttcctggcagcaaagaacctgagcgacgcaatcctgctgagcgacatcctgagagtcaacacagaaatcacaaaggcaccgctgagcgcaagcatgatcaagagatacgacgaacaccaccaggacctgacactgctgaaggcactggtcagacagcagctgccggaaaagtacaaggaaatcttcttcgaccagagcaagaacggatacgcaggatacatcgacggaggagcaagccaggaagaattctacaagttcatcaagccgatcctggaaaagatggacggaacagaagaactgctggtcaagctgaacagagaagacctgctgagaaagcagagaacattcgacaacggaagcatcccgcaccagatccacctgggagaactgcacgcaatcctgagaagacaggaagacttctacccgttcctgaaggacaacagagaaaagatcgaaaagatcctgacattcagaatcccgtactacgtcggaccgctggcaagaggaaacagcagattcgcatggatgacaagaaagagcgaagaaacaatcacaccgtggaacttcgaagaagtcgtcgacaagggagcaagcgcacagagcttcatcgaaagaatgacaaacttcgacaagaacctgccgaacgaaaaggtcctgccgaagcacagcctgctgtacgaatacttcacagtctacaacgaactgacaaaggtcaagtacgtcacagaaggaatgagaaagccggcattcctgagcggagaacagaagaaggcaatcgtcgacctgctgttcaagacaaacagaaaggtcacagtcaagcagctgaaggaagactacttcaagaagatcgaatgcttcgacagcgtcgaaatcagcggagtcgaagacagattcaacgcaagcctgggaacataccacgacctgctgaagatcatcaaggacaaggacttcctggacaacgaagaaaacgaagacatcctggaagacatcgtcctgacactgacactgttcgaagacagagaaatgatcgaagaaagactgaagacatacgcacacctgttcgacgacaaggtcatgaagcagctgaagagaagaagatacacaggatggggaagactgagcagaaagctgatcaacggaatcagagacaagcagagcggaaagacaatcctggacttcctgaagagcgacggattcgcaaacagaaacttcatgcagctgatccacgacgacagcctgacattcaaggaagacatccagaaggcacaggtcagcggacagggagacagcctgcacgaacacatcgcaaacctggcaggaagcccggcaatcaagaagggaatcctgcagacagtcaaggtcgtcgacgaactggtcaaggtcatgggaagacacaagccggaaaacatcgtcatcgaaatggcaagagaaaaccagacaacacagaagggacagaagaacagcagagaaagaatgaagagaatcgaagaaggaatcaaggaactgggaagccagatcctgaaggaacacccggtcgaaaacacacagctgcagaacgaaaagctgtacctgtactacctgcaaaacggaagagacatgtacgtcgaccaggaactggacatcaacagactgagcgactacgacgtcgaccacatcgtcccgcagagcttcctgaaggacgacagcatcgacaacaaggtcctgacaagaagcgacaagaacagaggaaagagcgacaacgtcccgagcgaagaagtcgtcaagaagatgaagaactactggagacagctgctgaacgcaaagctgatcacacagagaaagttcgacaacctgacaaaggcagagagaggaggactgagcgaactggacaaggcaggattcatcaagagacagctggtcgaaacaagacagatcacaaagcacgtcgcacagatcctggacagcagaatgaacacaaagtacgacgaaaacgacaagctgatcagagaagtcaaggtcatcacactgaagagcaagctggtcagcgacttcagaaaggacttccagttctacaaggtcagagaaatcaacaactaccaccacgcacacgacgcatacctgaacgcagtcgtcggaacagcactgatcaagaagtacccgaagctggaaagcgaattcgtctacggagactacaaggtctacgacgtcagaaagatgatcgcaaagagcgaacaggaaatcggaaaggcaacagcaaagtacttcttctacagcaacatcatgaacttcttcaagacagaaatcacactggcaaacggagaaatcagaaagagaccgctgatcgaaacaaacggagaaacaggagaaatcgtctgggacaagggaagagacttcgcaacagtcagaaaggtcctgagcatgccgcaggtcaacatcgtcaagaagacagaagtccagacaggaggattcagcaaggaaagcatcctgccgaagagaaacagcgacaagctgatcgcaagaaagaaggactgggacccgaagaagtacggaggattcgacagcccgacagtcgcatacagcgtcctggtcgtcgcaaaggtcgaaaagggaaagagcaagaagctgaagagcgtcaaggaactgctgggaatcacaatcatggaaagaagcagcttcgaaaagaacccgatcgacttcctggaagcaaagggatacaaggaagtcaagaaggacctgatcatcaagctgccgaagtacagcctgttcgaactggaaaacggaagaaagagaatgctggcaagcgcaggagaactgcagaagggaaacgaactggcactgccgagcaagtacgtcaacttcctgtacctggcaagccactacgaaaagctgaagggaagcccggaagacaacgaacagaagcagctgttcgtcgaacagcacaagcactacctggacgaaatcatcgaacagatcagcgaattcagcaagagagtcatcctggcagacgcaaacctggacaaggtcctgagcgcatacaacaagcacagagacaagccgatcagagaacaggcagaaaacatcatccacctgttcacactgacaaacctgggagcaccggcagcattcaagtacttcgacacaacaatcgacagaaagagatacacaagcacaaaggaagtcctggacgcaacactgatccaccagagcatcacaggactgtacgaaacaagaatcgacctgagccagctgggaggagacggaggaggaagcccgaagaagaagagaaaggtctagctagccatcacatttaaaagcatctcagcctaccatgagaataagagaaagaaaatgaagatcaatagcttattcatctctttttctttttcgttggtgtaaagccaacaccctgtctaaaaaacataaatttctttaatcattttgcctcttttctctgtgcttcaattaataaaaaatggaaagaacctcgag

SEQ ID NO: 252 - DNA, 4140 bp, Artificial Sequence
  Synthetic: Cas9 ORF with minimal uridine codons frequently used in humans in general; 12.75% U content
atggacaagaagtacagcatcggcctggacatcggcaccaacagcgtgggctgggccgtgatcaccgacgagtacaaggtgcccagcaagaagttcaaggtgctgggcaacaccgacagacacagcatcaagaagaacctgatcggcgccctgctgttcgacagcggcgagaccgccgaggccaccagactgaagagaaccgccagaagaagatacaccagaagaaagaacagaatctgctacctgcaggagatcttcagcaacgagatggccaaggtggacgacagcttcttccacagactggaggagagcttcctggtggaggaggacaagaagcacgagagacaccccatcttcggcaacatcgtggacgaggtggcctaccacgagaagtaccccaccatctaccacctgagaaagaagctggtggacagcaccgacaaggccgacctgagactgatctacctggccctggcccacatgatcaagttcagaggccacttcctgatcgagggcgacctgaaccccgacaacagcgacgtggacaagctgttcatccagctggtgcagacctacaaccagctgttcgaggagaaccccatcaacgccagcggcgtggacgccaaggccatcctgagcgccagactgagcaagagcagaagactggagaacctgatcgcccagctgcccggcgagaagaagaacggcctgttcggcaacctgatcgccctgagcctgggcctgacccccaacttcaagagcaacttcgacctggccgaggacgccaagctgcagctgagcaaggacacctacgacgacgacctggacaacctgctggcccagatcggcgaccagtacgccgacctgttcctggccgccaagaacctgagcgacgccatcctgctgagcgacatcctgagagtgaacaccgagatcaccaaggcccccctgagcgccagcatgatcaagagatacgacgagcaccaccaggacctgaccctgctgaaggccctggtgagacagcagctgcccgagaagtacaaggagatcttcttcgaccagagcaagaacggctacgccggctacatcgacggcggcgccagccaggaggagttctacaagttcatcaagcccatcctggagaagatggacggcaccgaggagctgctggtgaagctgaacagagaggacctgctgagaaagcagagaaccttcgacaacggcagcatcccccaccagatccacctgggcgagctgcacgccatcctgagaagacaggaggacttctaccccttcctgaaggacaacagagagaagatcgagaagatcctgaccttcagaatcccctactacgtgggccccctggccagaggcaacagcagattcgcctggatgaccagaaagagcgaggagaccatcaccccctggaacttcgaggaggtggtggacaagggcgccagcgcccagagcttcatcgagagaatgaccaacttcgacaagaacctgcccaacgagaaggtgctgcccaagcacagcctgctgtacgagtacttcaccgtgtacaacgagctgaccaaggtgaagtacgtgaccgagggcatgagaaagcccgccttcctgagcggcgagcagaagaaggccatcgtggacctgctgttcaagaccaacagaaaggtgaccgtgaagcagctgaaggaggactacttcaagaagatcgagtgcttcgacagcgtggagatcagcggcgtggaggacagattcaacgccagcctgggcacctaccacgacctgctgaagatcatcaaggacaaggacttcctggacaacgaggagaacgaggacatcctggaggacatcgtgctgaccctgaccctgttcgaggacagagagatgatcgaggagagactgaagacctacgcccacctgttcgacgacaaggtgatgaagcagctgaagagaagaagatacaccggctggggcagactgagcagaaagctgatcaacggcatcagagacaagcagagcggcaagaccatcctggacttcctgaagagcgacggcttcgccaacagaaacttcatgcagctgatccacgacgacagcctgaccttcaaggaggacatccagaaggcccaggtgagcggccagggcgacagcctgcacgagcacatcgccaacctggccggcagccccgccatcaagaagggcatcctgcagaccgtgaaggtggtggacgagctggtgaaggtgatgggcagacacaagcccgagaacatcgtgatcgagatggccagagagaaccagaccacccagaagggccagaagaacagcagagagagaatgaagagaatcgaggagggcatcaaggagctgggcagccagatcctgaaggagcaccccgtggagaacacccagctgcagaacgagaagctgtacctgtactacctgcagaacggcagagacatgtacgtggaccaggagctggacatcaacagactgagcgactacgacgtggaccacatcgtgccccagagcttcctgaaggacgacagcatcgacaacaaggtgctgaccagaagcgacaagaacagaggcaagagcgacaacgtgcccagcgaggaggtggtgaagaagatgaagaactactggagacagctgctgaacgccaagctgatcacccagagaaagttcgacaacctgaccaaggccgagagaggcggcctgagcgagctggacaaggccggcttcatcaagagacagctggtggagaccagacagatcaccaagcacgtggcccagatcctggacagcagaatgaacaccaagtacgacgagaacgacaagctgatcagagaggtgaaggtgatcaccctgaagagcaagctggtgagcgacttcagaaaggacttccagttctacaaggtgagagagatcaacaactaccaccacgcccacgacgcctacctgaacgccgtggtgggcaccgccctgatcaagaagtaccccaagctggagagcgagttcgtgtacggcgactacaaggtgtacgacgtgagaaagatgatcgccaagagcgagcaggagatcggcaaggccaccgccaagtacttcttctacagcaacatcatgaacttcttcaagaccgagatcaccctggccaacggcgagatcagaaagagacccctgatcgagaccaacggcgagaccggcgagatcgtgtgggacaagggcagagacttcgccaccgtgagaaaggtgctgagcatgccccaggtgaacatcgtgaagaagaccgaggtgcagaccggcggcttcagcaaggagagcatcctgcccaagagaaacagcgacaagctgatcgccagaaagaaggactgggaccccaagaagtacggcggcttcgacagccccaccgtggcctacagcgtgctggtggtggccaaggtggagaagggcaagagcaagaagctgaagagcgtgaaggagctgctgggcatcaccatcatggagagaagcagcttcgagaagaaccccatcgacttcctggaggccaagggctacaaggaggtgaagaaggacctgatcatcaagctgcccaagtacagcctgttcgagctggagaacggcagaaagagaatgctggccagcgccggcgagctgcagaagggcaacgagctggccctgcccagcaagtacgtgaacttcctgtacctggccagccactacgagaagctgaagggcagccccgaggacaacgagcagaagcagctgttcgtggagcagcacaagcactacctggacgagatcatcgagcagatcagcgagttcagcaagagagtgatcctggccgacgccaacctggacaaggtgctgagcgcctacaacaagcacagagacaagcccatcagagagcaggccgagaacatcatccacctgttcaccctgaccaacctgggcgcccccgccgccttcaagtacttcgacaccaccatcgacagaaagagatacaccagcaccaaggaggtgctggacgccaccctgatccaccagagcatcaccggcctgtacgagaccagaatcgacctgagccagctgggcggcgacggcggcggcagccccaagaagaagagaaaggtgtga

SEQ ID NO: 253 - DNA, 4411 bp, Artificial Sequence
  Synthetic: Cas9 transcript with 5 UTR of HSD, ORF corresponding to SEQ ID NO: 52, Kozak sequence, and 3 UTR of ALB
gggtcccgcagtcggcgtccagcggctctgcttgttcgtgtgtgtgtcgttgcaggccttattcggatccgccaccatggacaagaagtacagcatcggcctggacatcggcaccaacagcgtgggctgggccgtgatcaccgacgagtacaaggtgcccagcaagaagttcaaggtgctgggcaacaccgacagacacagcatcaagaagaacctgatcggcgccctgctgttcgacagcggcgagaccgccgaggccaccagactgaagagaaccgccagaagaagatacaccagaagaaagaacagaatctgctacctgcaggagatcttcagcaacgagatggccaaggtggacgacagcttcttccacagactggaggagagcttcctggtggaggaggacaagaagcacgagagacaccccatcttcggcaacatcgtggacgaggtggcctaccacgagaagtaccccaccatctaccacctgagaaagaagctggtggacagcaccgacaaggccgacctgagactgatctacctggccctggcccacatgatcaagttcagaggccacttcctgatcgagggcgacctgaaccccgacaacagcgacgtggacaagctgttcatccagctggtgcagacctacaaccagctgttcgaggagaaccccatcaacgccagcggcgtggacgccaaggccatcctgagcgccagactgagcaagagcagaagactggagaacctgatcgcccagctgcccggcgagaagaagaacggcctgttcggcaacctgatcgccctgagcctgggcctgacccccaacttcaagagcaacttcgacctggccgaggacgccaagctgcagctgagcaaggacacctacgacgacgacctggacaacctgctggcccagatcggcgaccagtacgccgacctgttcctggccgccaagaacctgagcgacgccatcctgctgagcgacatcctgagagtgaacaccgagatcaccaaggcccccctgagcgccagcatgatcaagagatacgacgagcaccaccaggacctgaccctgctgaaggccctggtgagacagcagctgcccgagaagtacaaggagatcttcttcgaccagagcaagaacggctacgccggctacatcgacggcggcgccagccaggaggagttctacaagttcatcaagcccatcctggagaagatggacggcaccgaggagctgctggtgaagctgaacagagaggacctgctgagaaagcagagaaccttcgacaacggcagcatcccccaccagatccacctgggcgagctgcacgccatcctgagaagacaggaggacttctaccccttcctgaaggacaacagagagaagatcgagaagatcctgaccttcagaatcccctactacgtgggccccctggccagaggcaacagcagattcgcctggatgaccagaaagagcgaggagaccatcaccccctggaacttcgaggaggtggtggacaagggcgccagcgcccagagcttcatcgagagaatgaccaacttcgacaagaacctgcccaacgagaaggtgctgcccaagcacagcctgctgtacgagtacttcaccgtgtacaacgagctgaccaaggtgaagtacgtgaccgagggcatgagaaagcccgccttcctgagcggcgagcagaagaaggccatcgtggacctgctgttcaagaccaacagaaaggtgaccgtgaagcagctgaaggaggactacttcaagaagatcgagtgcttcgacagcgtggagatcagcggcgtggaggacagattcaacgccagcctgggcacctaccacgacctgctgaagatcatcaaggacaaggacttcctggacaacgaggagaacgaggacatcctggaggacatcgtgctgaccctgaccctgttcgaggacagagagatgatcgaggagagactgaagacctacgcccacctgttcgacgacaaggtgatgaagcagctgaagagaagaagatacaccggctggggcagactgagcagaaagctgatcaacggcatcagagacaagcagagcggcaagaccatcctggacttcctgaagagcgacggcttcgccaacagaaacttcatgcagctgatccacgacgacagcctgaccttcaaggaggacatccagaaggcccaggtgagcggccagggcgacagcctgcacgagcacatcgccaacctggccggcagccccgccatcaagaagggcatcctgcagaccgtgaaggtggtggacgagctggtgaaggtgatgggcagacacaagcccgagaacatcgtgatcgagatggccagagagaaccagaccacccagaagggccagaagaacagcagagagagaatgaagagaatcgaggagggcatcaaggagctgggcagccagatcctgaaggagcaccccgtggagaacacccagctgcagaacgagaagctgtacctgtactacctgcagaacggcagagacatgtacgtggaccaggagctggacatcaacagactgagcgactacgacgtggaccacatcgtgccccagagcttcctgaaggacgacagcatcgacaacaaggtgctgaccagaagcgacaagaacagaggcaagagcgacaacgtgcccagcgaggaggtggtgaagaagatgaagaactactggagacagctgctgaacgccaagctgatcacccagagaaagttcgacaacctgaccaaggccgagagaggcggcctgagcgagctggacaaggccggcttcatcaagagacagctggtggagaccagacagatcaccaagcacgtggcccagatcctggacagcagaatgaacaccaagtacgacgagaacgacaagctgatcagagaggtgaaggtgatcaccctgaagagcaagctggtgagcgacttcagaaaggacttccagttctacaaggtgagagagatcaacaactaccaccacgcccacgacgcctacctgaacgccgtggtgggcaccgccctgatcaagaagtaccccaagctggagagcgagttcgtgtacggcgactacaaggtgtacgacgtgagaaagatgatcgccaagagcgagcaggagatcggcaaggccaccgccaagtacttcttctacagcaacatcatgaacttcttcaagaccgagatcaccctggccaacggcgagatcagaaagagacccctgatcgagaccaacggcgagaccggcgagatcgtgtgggacaagggcagagacttcgccaccgtgagaaaggtgctgagcatgccccaggtgaacatcgtgaagaagaccgaggtgcagaccggcggcttcagcaaggagagcatcctgcccaagagaaacagcgacaagctgatcgccagaaagaaggactgggaccccaagaagtacggcggcttcgacagccccaccgtggcctacagcgtgctggtggtggccaaggtggagaagggcaagagcaagaagctgaagagcgtgaaggagctgctgggcatcaccatcatggagagaagcagcttcgagaagaaccccatcgacttcctggaggccaagggctacaaggaggtgaagaaggacctgatcatcaagctgcccaagtacagcctgttcgagctggagaacggcagaaagagaatgctggccagcgccggcgagctgcagaagggcaacgagctggccctgcccagcaagtacgtgaacttcctgtacctggccagccactacgagaagctgaagggcagccccgaggacaacgagcagaagcagctgttcgtggagcagcacaagcactacctggacgagatcatcgagcagatcagcgagttcagcaagagagtgatcctggccgacgccaacctggacaaggtgctgagcgcctacaacaagcacagagacaagcccatcagagagcaggccgagaacatcatccacctgttcaccctgaccaacctgggcgcccccgccgccttcaagtacttcgacaccaccatcgacagaaagagatacaccagcaccaaggaggtgctggacgccaccctgatccaccagagcatcaccggcctgtacgagaccagaatcgacctgagccagctgggcggcgacggcggcggcagccccaagaagaagagaaaggtgtgactagccatcacatttaaaagcatctcagcctaccatgagaataagagaaagaaaatgaagatcaatagcttattcatctctttttctttttcgttggtgtaaagccaacaccctgtctaaaaaacataaatttctttaatcattttgcctcttttctctgtgcttcaattaataaaaaatggaaagaacctcgag

SEQ ID NO: 254 - DNA, 4140 bp, Artificial Sequence
  Synthetic: Cas9 ORF with minimal uridine codons infrequently used in humans in general; 12.75% U content
atggacaaaaaatacagcatagggctagacatagggacgaacagcgtagggtgggcggtaataacggacgaatacaaagtaccgagcaaaaaattcaaagtactagggaacacggaccgacacagcataaaaaaaaacctaataggggcgctactattcgacagcggggaaacggcggaagcgacgcgactaaaacgaacggcgcgacgacgatacacgcgacgaaaaaaccgaatatgctacctacaagaaatattcagcaacgaaatggcgaaagtagacgacagcttcttccaccgactagaagaaagcttcctagtagaagaagacaaaaaacacgaacgacacccgatattcgggaacatagtagacgaagtagcgtaccacgaaaaatacccgacgatataccacctacgaaaaaaactagtagacagcacggacaaagcggacctacgactaatatacctagcgctagcgcacatgataaaattccgagggcacttcctaatagaaggggacctaaacccggacaacagcgacgtagacaaactattcatacaactagtacaaacgtacaaccaactattcgaagaaaacccgataaacgcgagcggggtagacgcgaaagcgatactaagcgcgcgactaagcaaaagccgacgactagaaaacctaatagcgcaactaccgggggaaaaaaaaaacgggctattcgggaacctaatagcgctaagcctagggctaacgccgaacttcaaaagcaacttcgacctagcggaagacgcgaaactacaactaagcaaagacacgtacgacgacgacctagacaacctactagcgcaaataggggaccaatacgcggacctattcctagcggcgaaaaacctaagcgacgcgatactactaagcgacatactacgagtaaacacggaaataacgaaagcgccgctaagcgcgagcatgataaaacgatacgacgaacaccaccaagacctaacgctactaaaagcgctagtacgacaacaactaccggaaaaatacaaagaaatattcttcgaccaaagcaaaaacgggtacgcggggtacatagacgggggggcgagccaagaagaattctacaaattcataaaaccgatactagaaaaaatggacgggacggaagaactactagtaaaactaaaccgagaagacctactacgaaaacaacgaacgttcgacaacgggagcataccgcaccaaatacacctaggggaactacacgcgatactacgacgacaagaagacttctacccgttcctaaaagacaaccgagaaaaaatagaaaaaatactaacgttccgaataccgtactacgtagggccgctagcgcgagggaacagccgattcgcgtggatgacgcgaaaaagcgaagaaacgataacgccgtggaacttcgaagaagtagtagacaaaggggcgagcgcgcaaagcttcatagaacgaatgacgaacttcgacaaaaacctaccgaacgaaaaagtactaccgaaacacagcctactatacgaatacttcacggtatacaacgaactaacgaaagtaaaatacgtaacggaagggatgcgaaaaccggcgttcctaagcggggaacaaaaaaaagcgatagtagacctactattcaaaacgaaccgaaaagtaacggtaaaacaactaaaagaagactacttcaaaaaaatagaatgcttcgacagcgtagaaataagcggggtagaagaccgattcaacgcgagcctagggacgtaccacgacctactaaaaataataaaagacaaagacttcctagacaacgaagaaaacgaagacatactagaagacatagtactaacgctaacgctattcgaagaccgagaaatgatagaagaacgactaaaaacgtacgcgcacctattcgacgacaaagtaatgaaacaactaaaacgacgacgatacacggggtgggggcgactaagccgaaaactaataaacgggatacgagacaaacaaagcgggaaaacgatactagacttcctaaaaagcgacgggttcgcgaaccgaaacttcatgcaactaatacacgacgacagcctaacgttcaaagaagacatacaaaaagcgcaagtaagcgggcaaggggacagcctacacgaacacatagcgaacctagcggggagcccggcgataaaaaaagggatactacaaacggtaaaagtagtagacgaactagtaaaagtaatggggcgacacaaaccggaaaacatagtaatagaaatggcgcgagaaaaccaaacgacgcaaaaagggcaaaaaaacagccgagaacgaatgaaacgaatagaagaagggataaaagaactagggagccaaatactaaaagaacacccggtagaaaacacgcaactacaaaacgaaaaactatacctatactacctacaaaacgggcgagacatgtacgtagaccaagaactagacataaaccgactaagcgactacgacgtagaccacatagtaccgcaaagcttcctaaaagacgacagcatagacaacaaagtactaacgcgaagcgacaaaaaccgagggaaaagcgacaacgtaccgagcgaagaagtagtaaaaaaaatgaaaaactactggcgacaactactaaacgcgaaactaataacgcaacgaaaattcgacaacctaacgaaagcggaacgaggggggctaagcgaactagacaaagcggggttcataaaacgacaactagtagaaacgcgacaaataacgaaacacgtagcgcaaatactagacagccgaatgaacacgaaatacgacgaaaacgacaaactaatacgagaagtaaaagtaataacgctaaaaagcaaactagtaagcgacttccgaaaagacttccaattctacaaagtacgagaaataaacaactaccaccacgcgcacgacgcgtacctaaacgcggtagtagggacggcgctaataaaaaaatacccgaaactagaaagcgaattcgtatacggggactacaaagtatacgacgtacgaaaaatgatagcgaaaagcgaacaagaaatagggaaagcgacggcgaaatacttcttctacagcaacataatgaacttcttcaaaacggaaataacgctagcgaacggggaaatacgaaaacgaccgctaatagaaacgaacggggaaacgggggaaatagtatgggacaaagggcgagacttcgcgacggtacgaaaagtactaagcatgccgcaagtaaacatagtaaaaaaaacggaagtacaaacgggggggttcagcaaagaaagcatactaccgaaacgaaacagcgacaaactaatagcgcgaaaaaaagactgggacccgaaaaaatacggggggttcgacagcccgacggtagcgtacagcgtactagtagtagcgaaagtagaaaaagggaaaagcaaaaaactaaaaagcgtaaaagaactactagggataacgataatggaacgaagcagcttcgaaaaaaacccgatagacttcctagaagcgaaagggtacaaagaagtaaaaaaagacctaataataaaactaccgaaatacagcctattcgaactagaaaacgggcgaaaacgaatgctagcgagcgcgggggaactacaaaaagggaacgaactagcgctaccgagcaaatacgtaaacttcctatacctagcgagccactacgaaaaactaaaagggagcccggaagacaacgaacaaaaacaactattcgtagaacaacacaaacactacctagacgaaataatagaacaaataagcgaattcagcaaacgagtaatactagcggacgcgaacctagacaaagtactaagcgcgtacaacaaacaccgagacaaaccgatacgagaacaagcggaaaacataatacacctattcacgctaacgaacctaggggcgccggcggcgttcaaatacttcgacacgacgatagaccgaaaacgatacacgagcacgaaagaagtactagacgcgacgctaatacaccaaagcataacggggctatacgaaacgcgaatagacctaagccaactagggggggacgggggggggagcccgaaaaaaaaacgaaaagtatga

SEQ ID NO: 255 - DNA, 4411 bp, Artificial Sequence
  Synthetic: Cas9 transcript with 5 UTR of HSD, ORF corresponding to SEQ ID NO: 54, Kozak sequence, and 3 UTR of ALB
gggtcccgcagtcggcgtccagcggctctgcttgttcgtgtgtgtgtcgttgcaggccttattcggatccgccaccatggacaaaaaatacagcatagggctagacatagggacgaacagcgtagggtgggcggtaataacggacgaatacaaagtaccgagcaaaaaattcaaagtactagggaacacggaccgacacagcataaaaaaaaacctaataggggcgctactattcgacagcggggaaacggcggaagcgacgcgactaaaacgaacggcgcgacgacgatacacgcgacgaaaaaaccgaatatgctacctacaagaaatattcagcaacgaaatggcgaaagtagacgacagcttcttccaccgactagaagaaagcttcctagtagaagaagacaaaaaacacgaacgacacccgatattcgggaacatagtagacgaagtagcgtaccacgaaaaatacccgacgatataccacctacgaaaaaaactagtagacagcacggacaaagcggacctacgactaatatacctagcgctagcgcacatgataaaattccgagggcacttcctaatagaaggggacctaaacccggacaacagcgacgtagacaaactattcatacaactagtacaaacgtacaaccaactattcgaagaaaacccgataaacgcgagcggggtagacgcgaaagcgatactaagcgcgcgactaagcaaaagccgacgactagaaaacctaatagcgcaactaccgggggaaaaaaaaaacgggctattcgggaacctaatagcgctaagcctagggctaacgccgaacttcaaaagcaacttcgacctagcggaagacgcgaaactacaactaagcaaagacacgtacgacgacgacctagacaacctactagcgcaaataggggaccaatacgcggacctattcctagcggcgaaaaacctaagcgacgcgatactactaagcgacatactacgagtaaacacggaaataacgaaagcgccgctaagcgcgagcatgataaaacgatacgacgaacaccaccaagacctaacgctactaaaagcgctagtacgacaacaactaccggaaaaatacaaagaaatattcttcgaccaaagcaaaaacgggtacgcggggtacatagacgggggggcgagccaagaagaattctacaaattcataaaaccgatactagaaaaaatggacgggacggaagaactactagtaaaactaaaccgagaagacctactacgaaaacaacgaacgttcgacaacgggagcataccgcaccaaatacacctaggggaactacacgcgatactacgacgacaagaagacttctacccgttcctaaaagacaaccgagaaaaaatagaaaaaatactaacgttccgaataccgtactacgtagggccgctagcgcgagggaacagccgattcgcgtggatgacgcgaaaaagcgaagaaacgataacgccgtggaacttcgaagaagtagtagacaaaggggcgagcgcgcaaagcttcatagaacgaatgacgaacttcgacaaaaacctaccgaacgaaaaagtactaccgaaacacagcctactatacgaatacttcacggtatacaacgaactaacgaaagtaaaatacgtaacggaagggatgcgaaaaccggcgttcctaagcggggaacaaaaaaaagcgatagtagacctactattcaaaacgaaccgaaaagtaacggtaaaacaactaaaagaagactacttcaaaaaaatagaatgcttcgacagcgtagaaataagcggggtagaagaccgattcaacgcgagcctagggacgtaccacgacctactaaaaataataaaagacaaagacttcctagacaacgaagaaaacgaagacatactagaagacatagtactaacgctaacgctattcgaagaccgagaaatgatagaagaacgactaaaaacgtacgcgcacctattcgacgacaaagtaatgaaacaactaaaacgacgacgatacacggggtgggggcgactaagccgaaaactaataaacgggatacgagacaaacaaagcgggaaaacgatactagacttcctaaaaagcgacgggttcgcgaaccgaaacttcatgcaactaatacacgacgacagcctaacgttcaaagaagacatacaaaaagcgcaagtaagcgggcaaggggacagcctacacgaacacatagcgaacctagcggggagcccggcgataaaaaaagggatactacaaacggtaaaagtagtagacgaactagtaaaagtaatggggcgacacaaaccggaaaacatagtaatagaaatggcgcgagaaaaccaaacgacgcaaaaagggcaaaaaaacagccgagaacgaatgaaacgaatagaagaagggataaaagaactagggagccaaatactaaaagaacacccggtagaaaacacgcaactacaaaacgaaaaactatacctatactacctacaaaacgggcgagacatgtacgtagaccaagaactagacataaaccgactaagcgactacgacgtagaccacatagtaccgcaaagcttcctaaaagacgacagcatagacaacaaagtactaacgcgaagcgacaaaaaccgagggaaaagcgacaacgtaccgagcgaagaagtagtaaaaaaaatgaaaaactactggcgacaactactaaacgcgaaactaataacgcaacgaaaattcgacaacctaacgaaagcggaacgaggggggctaagcgaactagacaaagcggggttcataaaacgacaactagtagaaacgcgacaaataacgaaacacgtagcgcaaatactagacagccgaatgaacacgaaatacgacgaaaacgacaaactaatacgagaagtaaaagtaataacgctaaaaagcaaactagtaagcgacttccgaaaagacttccaattctacaaagtacgagaaataaacaactaccaccacgcgcacgacgcgtacctaaacgcggtagtagggacggcgctaataaaaaaatacccgaaactagaaagcgaattcgtatacggggactacaaagtatacgacgtacgaaaaatgatagcgaaaagcgaacaagaaatagggaaagcgacggcgaaatacttcttctacagcaacataatgaacttcttcaaaacggaaataacgctagcgaacggggaaatacgaaaacgaccgctaatagaaacgaacggggaaacgggggaaatagtatgggacaaagggcgagacttcgcgacggtacgaaaagtactaagcatgccgcaagtaaacatagtaaaaaaaacggaagtacaaacgggggggttcagcaaagaaagcatactaccgaaacgaaacagcgacaaactaatagcgcgaaaaaaagactgggacccgaaaaaatacggggggttcgacagcccgacggtagcgtacagcgtactagtagtagcgaaagtagaaaaagggaaaagcaaaaaactaaaaagcgtaaaagaactactagggataacgataatggaacgaagcagcttcgaaaaaaacccgatagacttcctagaagcgaaagggtacaaagaagtaaaaaaagacctaataataaaactaccgaaatacagcctattcgaactagaaaacgggcgaaaacgaatgctagcgagcgcgggggaactacaaaaagggaacgaactagcgctaccgagcaaatacgtaaacttcctatacctagcgagccactacgaaaaactaaaagggagcccggaagacaacgaacaaaaacaactattcgtagaacaacacaaacactacctagacgaaataatagaacaaataagcgaattcagcaaacgagtaatactagcggacgcgaacctagacaaagtactaagcgcgtacaacaaacaccgagacaaaccgatacgagaacaagcggaaaacataatacacctattcacgctaacgaacctaggggcgccggcggcgttcaaatacttcgacacgacgatagaccgaaaacgatacacgagcacgaaagaagtactagacgcgacgctaatacaccaaagcataacggggctatacgaaacgcgaatagacctaagccaactagggggggacgggggggggagcccgaaaaaaaaacgaaaagtatgactagccatcacatttaaaagcatctcagcctaccatgagaataagagaaagaaaatgaagatcaatagcttattcatctctttttctttttcgttggtgtaaagccaacaccctgtctaaaaaacataaatttctttaatcattttgcctcttttctctgtgcttcaattaataaaaaatggaaagaacctcgag

SEQ ID NO: 256 - DNA, 4411 bp, Artificial Sequence
  Synthetic: Cas9 transcript with AGG as first three nucleotides for use with CleanCapTM, 5 UTR of HSD, ORF corresponding to SEQ ID NO: 4, Kozak sequence, and 3 UTR of ALB
aggtcccgcagtcggcgtccagcggctctgcttgttcgtgtgtgtgtcgttgcaggccttattcggatccgccaccatggacaagaagtacagcatcggactggacatcggaacaaacagcgtcggatgggcagtcatcacagacgaatacaaggtcccgagcaagaagttcaaggtcctgggaaacacagacagacacagcatcaagaagaacctgatcggagcactgctgttcgacagcggagaaacagcagaagcaacaagactgaagagaacagcaagaagaagatacacaagaagaaagaacagaatctgctacctgcaggaaatcttcagcaacgaaatggcaaaggtcgacgacagcttcttccacagactggaagaaagcttcctggtcgaagaagacaagaagcacgaaagacacccgatcttcggaaacatcgtcgacgaagtcgcataccacgaaaagtacccgacaatctaccacctgagaaagaagctggtcgacagcacagacaaggcagacctgagactgatctacctggcactggcacacatgatcaagttcagaggacacttcctgatcgaaggagacctgaacccggacaacagcgacgtcgacaagctgttcatccagctggtccagacatacaaccagctgttcgaagaaaacccgatcaacgcaagcggagtcgacgcaaaggcaatcctgagcgcaagactgagcaagagcagaagactggaaaacctgatcgcacagctgccgggagaaaagaagaacggactgttcggaaacctgatcgcactgagcctgggactgacaccgaacttcaagagcaacttcgacctggcagaagacgcaaagctgcagctgagcaaggacacatacgacgacgacctggacaacctgctggcacagatcggagaccagtacgcagacctgttcctggcagcaaagaacctgagcgacgcaatcctgctgagcgacatcctgagagtcaacacagaaatcacaaaggcaccgctgagcgcaagcatgatcaagagatacgacgaacaccaccaggacctgacactgctgaaggcactggtcagacagcagctgccggaaaagtacaaggaaatcttcttcgaccagagcaagaacggatacgcaggatacatcgacggaggagcaagccaggaagaattctacaagttcatcaagccgatcctggaaaagatggacggaacagaagaactgctggtcaagctgaacagagaagacctgctgagaaagcagagaacattcgacaacggaagcatcccgcaccagatccacctgggagaactgcacgcaatcctgagaagacaggaagacttctacccgttcctgaaggacaacagagaaaagatcgaaaagatcctgacattcagaatcccgtactacgtcggaccgctggcaagaggaaacagcagattcgcatggatgacaagaaagagcgaagaaacaatcacaccgtggaacttcgaagaagtcgtcgacaagggagcaagcgcacagagcttcatcgaaagaatgacaaacttcgacaagaacctgccgaacgaaaaggtcctgccgaagcacagcctgctgtacgaatacttcacagtctacaacgaactgacaaaggtcaagtacgtcacagaaggaatgagaaagccggcattcctgagcggagaacagaagaaggcaatcgtcgacctgctgttcaagacaaacagaaaggtcacagtcaagcagctgaaggaagactacttcaagaagatcgaatgcttcgacagcgtcgaaatcagcggagtcgaagacagattcaacgcaagcctgggaacataccacgacctgctgaagatcatcaaggacaaggacttcctggacaacgaagaaaacgaagacatcctggaagacatcgtcctgacactgacactgttcgaagacagagaaatgatcgaagaaagactgaagacatacgcacacctgttcgacgacaaggtcatgaagcagctgaagagaagaagatacacaggatggggaagactgagcagaaagctgatcaacggaatcagagacaagcagagcggaaagacaatcctggacttcctgaagagcgacggattcgcaaacagaaacttcatgcagctgatccacgacgacagcctgacattcaaggaagacatccagaaggcacaggtcagcggacagggagacagcctgcacgaacacatcgcaaacctggcaggaagcccggcaatcaagaagggaatcctgcagacagtcaaggtcgtcgacgaactggtcaaggtcatgggaagacacaagccggaaaacatcgtcatcgaaatggcaagagaaaaccagacaacacagaagggacagaagaacagcagagaaagaatgaagagaatcgaagaaggaatcaaggaactgggaagccagatcctgaaggaacacccggtcgaaaacacacagctgcagaacgaaaagctgtacctgtactacctgcagaacggaagagacatgtacgtcgaccaggaactggacatcaacagactgagcgactacgacgtcgaccacatcgtcccgcagagcttcctgaaggacgacagcatcgacaacaaggtcctgacaagaagcgacaagaacagaggaaagagcgacaacgtcccgagcgaagaagtcgtcaagaagatgaagaactactggagacagctgctgaacgcaaagctgatcacacagagaaagttcgacaacctgacaaaggcagagagaggaggactgagcgaactggacaaggcaggattcatcaagagacagctggtcgaaacaagacagatcacaaagcacgtcgcacagatcctggacagcagaatgaacacaaagtacgacgaaaacgacaagctgatcagagaagtcaaggtcatcacactgaagagcaagctggtcagcgacttcagaaaggacttccagttctacaaggtcagagaaatcaacaactaccaccacgcacacgacgcatacctgaacgcagtcgtcggaacagcactgatcaagaagtacccgaagctggaaagcgaattcgtctacggagactacaaggtctacgacgtcagaaagatgatcgcaaagagcgaacaggaaatcggaaaggcaacagcaaagtacttcttctacagcaacatcatgaacttcttcaagacagaaatcacactggcaaacggagaaatcagaaagagaccgctgatcgaaacaaacggagaaacaggagaaatcgtctgggacaagggaagagacttcgcaacagtcagaaaggtcctgagcatgccgcaggtcaacatcgtcaagaagacagaagtccagacaggaggattcagcaaggaaagcatcctgccgaagagaaacagcgacaagctgatcgcaagaaagaaggactgggacccgaagaagtacggaggattcgacagcccgacagtcgcatacagcgtcctggtcgtcgcaaaggtcgaaaagggaaagagcaagaagctgaagagcgtcaaggaactgctgggaatcacaatcatggaaagaagcagcttcgaaaagaacccgatcgacttcctggaagcaaagggatacaaggaagtcaagaaggacctgatcatcaagctgccgaagtacagcctgttcgaactggaaaacggaagaaagagaatgctggcaagcgcaggagaactgcagaagggaaacgaactggcactgccgagcaagtacgtcaacttcctgtacctggcaagccactacgaaaagctgaagggaagcccggaagacaacgaacagaagcagctgttcgtcgaacagcacaagcactacctggacgaaatcatcgaacagatcagcgaattcagcaagagagtcatcctggcagacgcaaacctggacaaggtcctgagcgcatacaacaagcacagagacaagccgatcagagaacaggcagaaaacatcatccacctgttcacactgacaaacctgggagcaccggcagcattcaagtacttcgacacaacaatcgacagaaagagatacacaagcacaaaggaagtcctggacgcaacactgatccaccagagcatcacaggactgtacgaaacaagaatcgacctgagccagctgggaggagacggaggaggaagcccgaagaagaagagaaaggtctagctagccatcacatttaaaagcatctcagcctaccatgagaataagagaaagaaaatgaagatcaatagcttattcatctctttttctttttcgttggtgtaaagccaacaccctgtctaaaaaacataaatttctttaatcattttgcctcttttctctgtgcttcaattaataaaaaatggaaagaacctcgag

SEQ ID NO: 257 - DNA, 4481 bp, Artificial Sequence
  Synthetic: Cas9 transcript with 5 UTR from CMV, ORF corresponding to SEQ ID NO: 4, Kozak sequence, and 3 UTR of ALB
gggcagatcgcctggagacgccatccacgctgttttgacctccatagaagacaccgggaccgatccagcctccgcggccgggaacggtgcattggaacgcggattccccgtgccaagagtgactcaccgtccttgacacggccaccatggacaagaagtacagcatcggactggacatcggaacaaacagcgtcggatgggcagtcatcacagacgaatacaaggtcccgagcaagaagttcaaggtcctgggaaacacagacagacacagcatcaagaagaacctgatcggagcactgctgttcgacagcggagaaacagcagaagcaacaagactgaagagaacagcaagaagaagatacacaagaagaaagaacagaatctgctacctgcaggaaatcttcagcaacgaaatggcaaaggtcgacgacagcttcttccacagactggaagaaagcttcctggtcgaagaagacaagaagcacgaaagacacccgatcttcggaaacatcgtcgacgaagtcgcataccacgaaaagtacccgacaatctaccacctgagaaagaagctggtcgacagcacagacaaggcagacctgagactgatctacctggcactggcacacatgatcaagttcagaggacacttcctgatcgaaggagacctgaacccggacaacagcgacgtcgacaagctgttcatccagctggtccagacatacaaccagctgttcgaagaaaacccgatcaacgcaagcggagtcgacgcaaaggcaatcctgagcgcaagactgagcaagagcagaagactggaaaacctgatcgcacagctgccgggagaaaagaagaacggactgttcggaaacctgatcgcactgagcctgggactgacaccgaacttcaagagcaacttcgacctggcagaagacgcaaagctgcagctgagcaaggacacatacgacgacgacctggacaacctgctggcacagatcggagaccagtacgcagacctgttcctggcagcaaagaacctgagcgacgcaatcctgctgagcgacatcctgagagtcaacacagaaatcacaaaggcaccgctgagcgcaagcatgatcaagagatacgacgaacaccaccaggacctgacactgctgaaggcactggtcagacagcagctgccggaaaagtacaaggaaatcttcttcgaccagagcaagaacggatacgcaggatacatcgacggaggagcaagccaggaagaattctacaagttcatcaagccgatcctggaaaagatggacggaacagaagaactgctggtcaagctgaacagagaagacctgctgagaaagcagagaacattcgacaacggaagcatcccgcaccagatccacctgggagaactgcacgcaatcctgagaagacaggaagacttctacccgttcctgaaggacaacagagaaaagatcgaaaagatcctgacattcagaatcccgtactacgtcggaccgctggcaagaggaaacagcagattcgcatggatgacaagaaagagcgaagaaacaatcacaccgtggaacttcgaagaagtcgtcgacaagggagcaagcgcacagagcttcatcgaaagaatgacaaacttcgacaagaacctgccgaacgaaaaggtcctgccgaagcacagcctgctgtacgaatacttcacagtctacaacgaactgacaaaggtcaagtacgtcacagaaggaatgagaaagccggcattcctgagcggagaacagaagaaggcaatcgtcgacctgctgttcaagacaaacagaaaggtcacagtcaagcagctgaaggaagactacttcaagaagatcgaatgcttcgacagcgtcgaaatcagcggagtcgaagacagattcaacgcaagcctgggaacataccacgacctgctgaagatcatcaaggacaaggacttcctggacaacgaagaaaacgaagacatcctggaagacatcgtcctgacactgacactgttcgaagacagagaaatgatcgaagaaagactgaagacatacgcacacctgttcgacgacaaggtcatgaagcagctgaagagaagaagatacacaggatggggaagactgagcagaaagctgatcaacggaatcagagacaagcagagcggaaagacaatcctggacttcctgaagagcgacggattcgcaaacagaaacttcatgcagctgatccacgacgacagcctgacattcaaggaagacatccagaaggcacaggtcagcggacagggagacagcctgcacgaacacatcgcaaacctggcaggaagcccggcaatcaagaagggaatcctgcagacagtcaaggtcgtcgacgaactggtcaaggtcatgggaagacacaagccggaaaacatcgtcatcgaaatggcaagagaaaaccagacaacacagaagggacagaagaacagcagagaaagaatgaagagaatcgaagaaggaatcaaggaactgggaagccagatcctgaaggaacacccggtcgaaaacacacagctgcagaacgaaaagctgtacctgtactacctgcagaacggaagagacatgtacgtcgaccaggaactggacatcaacagactgagcgactacgacgtcgaccacatcgtcccgcagagcttcctgaaggacgacagcatcgacaacaaggtcctgacaagaagcgacaagaacagaggaaagagcgacaacgtcccgagcgaagaagtcgtcaagaagatgaagaactactggagacagctgctgaacgcaaagctgatcacacagagaaagttcgacaacctgacaaaggcagagagaggaggactgagcgaactggacaaggcaggattcatcaagagacagctggtcgaaacaagacagatcacaaagcacgtcgcacagatcctggacagcagaatgaacacaaagtacgacgaaaacgacaagctgatcagagaagtcaaggtcatcacactgaagagcaagctggtcagcgacttcagaaaggacttccagttctacaaggtcagagaaatcaacaactaccaccacgcacacgacgcatacctgaacgcagtcgtcggaacagcactgatcaagaagtacccgaagctggaaagcgaattcgtctacggagactacaaggtctacgacgtcagaaagatgatcgcaaagagcgaacaggaaatcggaaaggcaacagcaaagtacttcttctacagcaacatcatgaacttcttcaagacagaaatcacactggcaaacggagaaatcagaaagagaccgctgatcgaaacaaacggagaaacaggagaaatcgtctgggacaagggaagagacttcgcaacagtcagaaaggtcctgagcatgccgcaggtcaacatcgtcaagaagacagaagtccagacaggaggattcagcaaggaaagcatcctgccgaagagaaacagcgacaagctgatcgcaagaaagaaggactgggacccgaagaagtacggaggattcgacagcccgacagtcgcatacagcgtcctggtcgtcgcaaaggtcgaaaagggaaagagcaagaagctgaagagcgtcaaggaactgctgggaatcacaatcatggaaagaagcagcttcgaaaagaacccgatcgacttcctggaagcaaagggatacaaggaagtcaagaaggacctgatcatcaagctgccgaagtacagcctgttcgaactggaaaacggaagaaagagaatgctggcaagcgcaggagaactgcagaagggaaacgaactggcactgccgagcaagtacgtcaacttcctgtacctggcaagccactacgaaaagctgaagggaagcccggaagacaacgaacagaagcagctgttcgtcgaacagcacaagcactacctggacgaaatcatcgaacagatcagcgaattcagcaagagagtcatcctggcagacgcaaacctggacaaggtcctgagcgcatacaacaagcacagagacaagccgatcagagaacaggcagaaaacatcatccacctgttcacactgacaaacctgggagcaccggcagcattcaagtacttcgacacaacaatcgacagaaagagatacacaagcacaaaggaagtcctggacgcaacactgatccaccagagcatcacaggactgtacgaaacaagaatcgacctgagccagctgggaggagacggaggaggaagcccgaagaagaagagaaaggtctagctagccatcacatttaaaagcatctcagcctaccatgagaataagagaaagaaaatgaagatcaatagcttattcatctctttttctttttcgttggtgtaaagccaacaccctgtctaaaaaacataaatttctttaatcattttgcctcttttctctgtgcttcaattaataaaaaatggaaagaacctcgag

SEQ ID NO: 258 - DNA, 4348 bp, Artificial Sequence
  Synthetic: Cas9 transcript with 5 UTR from HBB, ORF corresponding to SEQ ID NO: 4, Kozak sequence, and 3 UTR of HBB
gggacatttgcttctgacacaactgtgttcactagcaacctcaaacagacaccggatctgccaccatggacaagaagtacagcatcggactggacatcggaacaaacagcgtcggatgggcagtcatcacagacgaatacaaggtcccgagcaagaagttcaaggtcctgggaaacacagacagacacagcatcaagaagaacctgatcggagcactgctgttcgacagcggagaaacagcagaagcaacaagactgaagagaacagcaagaagaagatacacaagaagaaagaacagaatctgctacctgcaggaaatcttcagcaacgaaatggcaaaggtcgacgacagcttcttccacagactggaagaaagcttcctggtcgaagaagacaagaagcacgaaagacacccgatcttcggaaacatcgtcgacgaagtcgcataccacgaaaagtacccgacaatctaccacctgagaaagaagctggtcgacagcacagacaaggcagacctgagactgatctacctggcactggcacacatgatcaagttcagaggacacttcctgatcgaaggagacctgaacccggacaacagcgacgtcgacaagctgttcatccagctggtccagacatacaaccagctgttcgaagaaaacccgatcaacgcaagcggagtcgacgcaaaggcaatcctgagcgcaagactgagcaagagcagaagactggaaaacctgatcgcacagctgccgggagaaaagaagaacggactgttcggaaacctgatcgcactgagcctgggactgacaccgaacttcaagagcaacttcgacctggcagaagacgcaaagctgcagctgagcaaggacacatacgacgacgacctggacaacctgctggcacagatcggagaccagtacgcagacctgttcctggcagcaaagaacctgagcgacgcaatcctgctgagcgacatcctgagagtcaacacagaaatcacaaaggcaccgctgagcgcaagcatgatcaagagatacgacgaacaccaccaggacctgacactgctgaaggcactggtcagacagcagctgccggaaaagtacaaggaaatcttcttcgaccagagcaagaacggatacgcaggatacatcgacggaggagcaagccaggaagaattctacaagttcatcaagccgatcctggaaaagatggacggaacagaagaactgctggtcaagctgaacagagaagacctgctgagaaagcagagaacattcgacaacggaagcatcccgcaccagatccacctgggagaactgcacgcaatcctgagaagacaggaagacttctacccgttcctgaaggacaacagagaaaagatcgaaaagatcctgacattcagaatcccgtactacgtcggaccgctggcaagaggaaacagcagattcgcatggatgacaagaaagagcgaagaaacaatcacaccgtggaacttcgaagaagtcgtcgacaagggagcaagcgcacagagcttcatcgaaagaatgacaaacttcgacaagaacctgccgaacgaaaaggtcctgccgaagcacagcctgctgtacgaatacttcacagtctacaacgaactgacaaaggtcaagtacgtcacagaaggaatgagaaagccggcattcctgagcggagaacagaagaaggcaatcgtcgacctgctgttcaagacaaacagaaaggtcacagtcaagcagctgaaggaagactacttcaagaagatcgaatgcttcgacagcgtcgaaatcagcggagtcgaagacagattcaacgcaagcctgggaacataccacgacctgctgaagatcatcaaggacaaggacttcctggacaacgaagaaaacgaagacatcctggaagacatcgtcctgacactgacactgttcgaagacagagaaatgatcgaagaaagactgaagacatacgcacacctgttcgacgacaaggtcatgaagcagctgaagagaagaagatacacaggatggggaagactgagcagaaagctgatcaacggaatcagagacaagcagagcggaaagacaatcctggacttcctgaagagcgacggattcgcaaacagaaacttcatgcagctgatccacgacgacagcctgacattcaaggaagacatccagaaggcacaggtcagcggacagggagacagcctgcacgaacacatcgcaaacctggcaggaagcccggcaatcaagaagggaatcctgcagacagtcaaggtcgtcgacgaactggtcaaggtcatgggaagacacaagccggaaaacatcgtcatcgaaatggcaagagaaaaccagacaacacagaagggacagaagaacagcagagaaagaatgaagagaatcgaagaaggaatcaaggaactgggaagccagatcctgaaggaacacccggtcgaaaacacacagctgcagaacgaaaagctgtacctgtactacctgcagaacggaagagacatgtacgtcgaccaggaactggacatcaacagactgagcgactacgacgtcgaccacatcgtcccgcagagcttcctgaaggacgacagcatcgacaacaaggtcctgacaagaagcgacaagaacagaggaaagagcgacaacgtcccgagcgaagaagtcgtcaagaagatgaagaactactggagacagctgctgaacgcaaagctgatcacacagagaaagttcgacaacctgacaaaggcagagagaggaggactgagcgaactggacaaggcaggattcatcaagagacagctggtcgaaacaagacagatcacaaagcacgtcgcacagatcctggacagcagaatgaacacaaagtacgacgaaaacgacaagctgatcagagaagtcaaggtcatcacactgaagagcaagctggtcagcgacttcagaaaggacttccagttctacaaggtcagagaaatcaacaactaccaccacgcacacgacgcatacctgaacgcagtcgtcggaacagcactgatcaagaagtacccgaagctggaaagcgaattcgtctacggagactacaaggtctacgacgtcagaaagatgatcgcaaagagcgaacaggaaatcggaaaggcaacagcaaagtacttcttctacagcaacatcatgaacttcttcaagacagaaatcacactggcaaacggagaaatcagaaagagaccgctgatcgaaacaaacggagaaacaggagaaatcgtctgggacaagggaagagacttcgcaacagtcagaaaggtcctgagcatgccgcaggtcaacatcgtcaagaagacagaagtccagacaggaggattcagcaaggaaagcatcctgccgaagagaaacagcgacaagctgatcgcaagaaagaaggactgggacccgaagaagtacggaggattcgacagcccgacagtcgcatacagcgtcctggtcgtcgcaaaggtcgaaaagggaaagagcaagaagctgaagagcgtcaaggaactgctgggaatcacaatcatggaaagaagcagcttcgaaaagaacccgatcgacttcctggaagcaaagggatacaaggaagtcaagaaggacctgatcatcaagctgccgaagtacagcctgttcgaactggaaaacggaagaaagagaatgctggcaagcgcaggagaactgcagaagggaaacgaactggcactgccgagcaagtacgtcaacttcctgtacctggcaagccactacgaaaagctgaagggaagcccggaagacaacgaacagaagcagctgttcgtcgaacagcacaagcactacctggacgaaatcatcgaacagatcagcgaattcagcaagagagtcatcctggcagacgcaaacctggacaaggtcctgagcgcatacaacaagcacagagacaagccgatcagagaacaggcagaaaacatcatccacctgttcacactgacaaacctgggagcaccggcagcattcaagtacttcgacacaacaatcgacagaaagagatacacaagcacaaaggaagtcctggacgcaacactgatccaccagagcatcacaggactgtacgaaacaagaatcgacctgagccagctgggaggagacggaggaggaagcccgaagaagaagagaaaggtctagctagcgctcgctttcttgctgtccaatttctattaaaggttcctttgttccctaagtccaactactaaactgggggatattatgaagggccttgagcatctggattctgcctaataaaaaacatttattttcattgcctcgag

SEQ ID NO: 259 - DNA, 4325 bp, Artificial Sequence
  Synthetic: Cas9 transcript with 5 UTR from XBG, ORF corresponding to SEQ ID NO: 4, Kozak sequence, and 3 UTR of XBG
gggaagctcagaataaacgctcaactttggccggatctgccaccatggacaagaagtacagcatcggactggacatcggaacaaacagcgtcggatgggcagtcatcacagacgaatacaaggtcccgagcaagaagttcaaggtcctgggaaacacagacagacacagcatcaagaagaacctgatcggagcactgctgttcgacagcggagaaacagcagaagcaacaagactgaagagaacagcaagaagaagatacacaagaagaaagaacagaatctgctacctgcaggaaatcttcagcaacgaaatggcaaaggtcgacgacagcttcttccacagactggaagaaagcttcctggtcgaagaagacaagaagcacgaaagacacccgatcttcggaaacatcgtcgacgaagtcgcataccacgaaaagtacccgacaatctaccacctgagaaagaagctggtcgacagcacagacaaggcagacctgagactgatctacctggcactggcacacatgatcaagttcagaggacacttcctgatcgaaggagacctgaacccggacaacagcgacgtcgacaagctgttcatccagctggtccagacatacaaccagctgttcgaagaaaacccgatcaacgcaagcggagtcgacgcaaaggcaatcctgagcgcaagactgagcaagagcagaagactggaaaacctgatcgcacagctgccgggagaaaagaagaacggactgttcggaaacctgatcgcactgagcctgggactgacaccgaacttcaagagcaacttcgacctggcagaagacgcaaagctgcagctgagcaaggacacatacgacgacgacctggacaacctgctggcacagatcggagaccagtacgcagacctgttcctggcagcaaagaacctgagcgacgcaatcctgctgagcgacatcctgagagtcaacacagaaatcacaaaggcaccgctgagcgcaagcatgatcaagagatacgacgaacaccaccaggacctgacactgctgaaggcactggtcagacagcagctgccggaaaagtacaaggaaatcttcttcgaccagagcaagaacggatacgcaggatacatcgacggaggagcaagccaggaagaattctacaagttcatcaagccgatcctggaaaagatggacggaacagaagaactgctggtcaagctgaacagagaagacctgctgagaaagcagagaacattcgacaacggaagcatcccgcaccagatccacctgggagaactgcacgcaatcctgagaagacaggaagacttctacccgttcctgaaggacaacagagaaaagatcgaaaagatcctgacattcagaatcccgtactacgtcggaccgctggcaagaggaaacagcagattcgcatggatgacaagaaagagcgaagaaacaatcacaccgtggaacttcgaagaagtcgtcgacaagggagcaagcgcacagagcttcatcgaaagaatgacaaacttcgacaagaacctgccgaacgaaaaggtcctgccgaagcacagcctgctgtacgaatacttcacagtctacaacgaactgacaaaggtcaagtacgtcacagaaggaatgagaaagccggcattcctgagcggagaacagaagaaggcaatcgtcgacctgctgttcaagacaaacagaaaggtcacagtcaagcagctgaaggaagactacttcaagaagatcgaatgcttcgacagcgtcgaaatcagcggagtcgaagacagattcaacgcaagcctgggaacataccacgacctgctgaagatcatcaaggacaaggacttcctggacaacgaagaaaacgaagacatcctggaagacatcgtcctgacactgacactgttcgaagacagagaaatgatcgaagaaagactgaagacatacgcacacctgttcgacgacaaggtcatgaagcagctgaagagaagaagatacacaggatggggaagactgagcagaaagctgatcaacggaatcagagacaagcagagcggaaagacaatcctggacttcctgaagagcgacggattcgcaaacagaaacttcatgcagctgatccacgacgacagcctgacattcaaggaagacatccagaaggcacaggtcagcggacagggagacagcctgcacgaacacatcgcaaacctggcaggaagcccggcaatcaagaagggaatcctgcagacagtcaaggtcgtcgacgaactggtcaaggtcatgggaagacacaagccggaaaacatcgtcatcgaaatggcaagagaaaaccagacaacacagaagggacagaagaacagcagagaaagaatgaagagaatcgaagaaggaatcaaggaactgggaagccagatcctgaaggaacacccggtcgaaaacacacagctgcagaacgaaaagctgtacctgtactacctgcagaacggaagagacatgtacgtcgaccaggaactggacatcaacagactgagcgactacgacgtcgaccacatcgtcccgcagagcttcctgaaggacgacagcatcgacaacaaggtcctgacaagaagcgacaagaacagaggaaagagcgacaacgtcccgagcgaagaagtcgtcaagaagatgaagaactactggagacagctgctgaacgcaaagctgatcacacagagaaagttcgacaacctgacaaaggcagagagaggaggactgagcgaactggacaaggcaggattcatcaagagacagctggtcgaaacaagacagatcacaaagcacgtcgcacagatcctggacagcagaatgaacacaaagtacgacgaaaacgacaagctgatcagagaagtcaaggtcatcacactgaagagcaagctggtcagcgacttcagaaaggacttccagttctacaaggtcagagaaatcaacaactaccaccacgcacacgacgcatacctgaacgcagtcgtcggaacagcactgatcaagaagtacccgaagctggaaagcgaattcgtctacggagactacaaggtctacgacgtcagaaagatgatcgcaaagagcgaacaggaaatcggaaaggcaacagcaaagtacttcttctacagcaacatcatgaacttcttcaagacagaaatcacactggcaaacggagaaatcagaaagagaccgctgatcgaaacaaacggagaaacaggagaaatcgtctgggacaagggaagagacttcgcaacagtcagaaaggtcctgagcatgccgcaggtcaacatcgtcaagaagacagaagtccagacaggaggattcagcaaggaaagcatcctgccgaagagaaacagcgacaagctgatcgcaagaaagaaggactgggacccgaagaagtacggaggattcgacagcccgacagtcgcatacagcgtcctggtcgtcgcaaaggtcgaaaagggaaagagcaagaagctgaagagcgtcaaggaactgctgggaatcacaatcatggaaagaagcagcttcgaaaagaacccgatcgacttcctggaagcaaagggatacaaggaagtcaagaaggacctgatcatcaagctgccgaagtacagcctgttcgaactggaaaacggaagaaagagaatgctggcaagcgcaggagaactgcagaagggaaacgaactggcactgccgagcaagtacgtcaacttcctgtacctggcaagccactacgaaaagctgaagggaagcccggaagacaacgaacagaagcagctgttcgtcgaacagcacaagcactacctggacgaaatcatcgaacagatcagcgaattcagcaagagagtcatcctggcagacgcaaacctggacaaggtcctgagcgcatacaacaagcacagagacaagccgatcagagaacaggcagaaaacatcatccacctgttcacactgacaaacctgggagcaccggcagcattcaagtacttcgacacaacaatcgacagaaagagatacacaagcacaaaggaagtcctggacgcaacactgatccaccagagcatcacaggactgtacgaaacaagaatcgacctgagccagctgggaggagacggaggaggaagcccgaagaagaagagaaaggtctagctagcaccagcctcaagaacacccgaatggagtctctaagctacataataccaacttacactttacaaaatgttgtcccccaaaatgtagccattcgtatctgctcctaataaaaagaaagtttcttcacattctctcgag

SEQ ID NO: 260 - DNA, 4325 bp, Artificial Sequence
  Synthetic: Cas9 transcript with AGG as first three nucleotides for use with CleanCapTM, 5 UTR from XBG, ORF corresponding to SEQ ID NO: 4, Kozak sequence, and 3 UTR of XBG
aggaagctcagaataaacgctcaactttggccggatctgccaccatggacaagaagtacagcatcggactggacatcggaacaaacagcgtcggatgggcagtcatcacagacgaatacaaggtcccgagcaagaagttcaaggtcctgggaaacacagacagacacagcatcaagaagaacctgatcggagcactgctgttcgacagcggagaaacagcagaagcaacaagactgaagagaacagcaagaagaagatacacaagaagaaagaacagaatctgctacctgcaggaaatcttcagcaacgaaatggcaaaggtcgacgacagcttcttccacagactggaagaaagcttcctggtcgaagaagacaagaagcacgaaagacacccgatcttcggaaacatcgtcgacgaagtcgcataccacgaaaagtacccgacaatctaccacctgagaaagaagctggtcgacagcacagacaaggcagacctgagactgatctacctggcactggcacacatgatcaagttcagaggacacttcctgatcgaaggagacctgaacccggacaacagcgacgtcgacaagctgttcatccagctggtccagacatacaaccagctgttcgaagaaaacccgatcaacgcaagcggagtcgacgcaaaggcaatcctgagcgcaagactgagcaagagcagaagactggaaaacctgatcgcacagctgccgggagaaaagaagaacggactgttcggaaacctgatcgcactgagcctgggactgacaccgaacttcaagagcaacttcgacctggcagaagacgcaaagctgcagctgagcaaggacacatacgacgacgacctggacaacctgctggcacagatcggagaccagtacgcagacctgttcctggcagcaaagaacctgagcgacgcaatcctgctgagcgacatcctgagagtcaacacagaaatcacaaaggcaccgctgagcgcaagcatgatcaagagatacgacgaacaccaccaggacctgacactgctgaaggcactggtcagacagcagctgccggaaaagtacaaggaaatcttcttcgaccagagcaagaacggatacgcaggatacatcgacggaggagcaagccaggaagaattctacaagttcatcaagccgatcctggaaaagatggacggaacagaagaactgctggtcaagctgaacagagaagacctgctgagaaagcagagaacattcgacaacggaagcatcccgcaccagatccacctgggagaactgcacgcaatcctgagaagacaggaagacttctacccgttcctgaaggacaacagagaaaagatcgaaaagatcctgacattcagaatcccgtactacgtcggaccgctggcaagaggaaacagcagattcgcatggatgacaagaaagagcgaagaaacaatcacaccgtggaacttcgaagaagtcgtcgacaagggagcaagcgcacagagcttcatcgaaagaatgacaaacttcgacaagaacctgccgaacgaaaaggtcctgccgaagcacagcctgctgtacgaatacttcacagtctacaacgaactgacaaaggtcaagtacgtcacagaaggaatgagaaagccggcattcctgagcggagaacagaagaaggcaatcgtcgacctgctgttcaagacaaacagaaaggtcacagtcaagcagctgaaggaagactacttcaagaagatcgaatgcttcgacagcgtcgaaatcagcggagtcgaagacagattcaacgcaagcctgggaacataccacgacctgctgaagatcatcaaggacaaggacttcctggacaacgaagaaaacgaagacatcctggaagacatcgtcctgacactgacactgttcgaagacagagaaatgatcgaagaaagactgaagacatacgcacacctgttcgacgacaaggtcatgaagcagctgaagagaagaagatacacaggatggggaagactgagcagaaagctgatcaacggaatcagagacaagcagagcggaaagacaatcctggacttcctgaagagcgacggattcgcaaacagaaacttcatgcagctgatccacgacgacagcctgacattcaaggaagacatccagaaggcacaggtcagcggacagggagacagcctgcacgaacacatcgcaaacctggcaggaagcccggcaatcaagaagggaatcctgcagacagtcaaggtcgtcgacgaactggtcaaggtcatgggaagacacaagccggaaaacatcgtcatcgaaatggcaagagaaaaccagacaacacagaagggacagaagaacagcagagaaagaatgaagagaatcgaagaaggaatcaaggaactgggaagccagatcctgaaggaacacccggtcgaaaacacacagctgcagaacgaaaagctgtacctgtactacctgcagaacggaagagacatgtacgtcgaccaggaactggacatcaacagactgagcgactacgacgtcgaccacatcgtcccgcagagcttcctgaaggacgacagcatcgacaacaaggtcctgacaagaagcgacaagaacagaggaaagagcgacaacgtcccgagcgaagaagtcgtcaagaagatgaagaactactggagacagctgctgaacgcaaagctgatcacacagagaaagttcgacaacctgacaaaggcagagagaggaggactgagcgaactggacaaggcaggattcatcaagagacagctggtcgaaacaagacagatcacaaagcacgtcgcacagatcctggacagcagaatgaacacaaagtacgacgaaaacgacaagctgatcagagaagtcaaggtcatcacactgaagagcaagctggtcagcgacttcagaaaggacttccagttctacaaggtcagagaaatcaacaactaccaccacgcacacgacgcatacctgaacgcagtcgtcggaacagcactgatcaagaagtacccgaagctggaaagcgaattcgtctacggagactacaaggtctacgacgtcagaaagatgatcgcaaagagcgaacaggaaatcggaaaggcaacagcaaagtacttcttctacagcaacatcatgaacttcttcaagacagaaatcacactggcaaacggagaaatcagaaagagaccgctgatcgaaacaaacggagaaacaggagaaatcgtctgggacaagggaagagacttcgcaacagtcagaaaggtcctgagcatgccgcaggtcaacatcgtcaagaagacagaagtccagacaggaggattcagcaaggaaagcatcctgccgaagagaaacagcgacaagctgatcgcaagaaagaaggactgggacccgaagaagtacggaggattcgacagcccgacagtcgcatacagcgtcctggtcgtcgcaaaggtcgaaaagggaaagagcaagaagctgaagagcgtcaaggaactgctgggaatcacaatcatggaaagaagcagcttcgaaaagaacccgatcgacttcctggaagcaaagggatacaaggaagtcaagaaggacctgatcatcaagctgccgaagtacagcctgttcgaactggaaaacggaagaaagagaatgctggcaagcgcaggagaactgcagaagggaaacgaactggcactgccgagcaagtacgtcaacttcctgtacctggcaagccactacgaaaagctgaagggaagcccggaagacaacgaacagaagcagctgttcgtcgaacagcacaagcactacctggacgaaatcatcgaacagatcagcgaattcagcaagagagtcatcctggcagacgcaaacctggacaaggtcctgagcgcatacaacaagcacagagacaagccgatcagagaacaggcagaaaacatcatccacctgttcacactgacaaacctgggagcaccggcagcattcaagtacttcgacacaacaatcgacagaaagagatacacaagcacaaaggaagtcctggacgcaacactgatccaccagagcatcacaggactgtacgaaacaagaatcgacctgagccagctgggaggagacggaggaggaagcccgaagaagaagagaaaggtctagctagcaccagcctcaagaacacccgaatggagtctctaagctacataataccaacttacactttacaaaatgttgtcccccaaaatgtagccattcgtatctgctcctaataaaaagaaagtttcttcacattctctcgag

SEQ ID NO: 261 - DNA, 4411 bp, Artificial Sequence; identical to SEQ ID NO: 256
  Synthetic: Cas9 transcript with AGG as first three nucleotides for use with CleanCapTM,  5 UTR from HSD, ORF corresponding to SEQ ID NO: 4, Kozak sequence, and 3 UTR of ALB

SEQ ID NO: 262 - RNA, 105 nt, Artificial Sequence; identical to SEQ ID NO: 4
  Synthetic: 30/30/39 poly-A sequence

SEQ ID NO: 263 - RNA, 93 nt, Artificial Sequence
  Synthetic: poly-A 100 sequence
aaaaaaaaaaaaaaaaaaaaaaaaaaaaaaaaaaaaaaaaaaaaaaaaaaaaaaaaaaaaaaaaaaaaaaaaaaaaaaaaaaaaaaaaaaaaa

SEQ ID NO: 264 - skipped

SEQ ID NO: 265 - DNA, 3312 bp, Artificial Sequence
  Synthetic: ORF encoding Neisseria meningitidis Cas9
atggcagcattcaagccgaactcgatcaactacatcctgggactggacatcggaatcgcatcggtcggatgggcaatggtcgaaatcgacgaagaagaaaacccgatcagactgatcgacctgggagtcagagtcttcgaaagagcagaagtcccgaagacaggagactcgctggcaatggcaagaagactggcaagatcggtcagaagactgacaagaagaagagcacacagactgctgagaacaagaagactgctgaagagagaaggagtcctgcaggcagcaaacttcgacgaaaacggactgatcaagtcgctgccgaacacaccgtggcagctgagagcagcagcactggacagaaagctgacaccgctggaatggtcggcagtcctgctgcacctgatcaagcacagaggatacctgtcgcagagaaagaacgaaggagaaacagcagacaaggaactgggagcactgctgaagggagtcgcaggaaacgcacacgcactgcagacaggagacttcagaacaccggcagaactggcactgaacaagttcgaaaaggaatcgggacacatcagaaaccagagatcggactactcgcacacattctcgagaaaggacctgcaggcagaactgatcctgctgttcgaaaagcagaaggaattcggaaacccgcacgtctcgggaggactgaaggaaggaatcgaaacactgctgatgacacagagaccggcactgtcgggagacgcagtccagaagatgctgggacactgcacattcgaaccggcagaaccgaaggcagcaaagaacacatacacagcagaaagattcatctggctgacaaagctgaacaacctgagaatcctggaacagggatcggaaagaccgctgacagacacagaaagagcaacactgatggacgaaccgtacagaaagtcgaagctgacatacgcacaggcaagaaagctgctgggactggaagacacagcattcttcaagggactgagatacggaaaggacaacgcagaagcatcgacactgatggaaatgaaggcataccacgcaatctcgagagcactggaaaaggaaggactgaaggacaagaagtcgccgctgaacctgtcgccggaactgcaggacgaaatcggaacagcattctcgctgttcaagacagacgaagacatcacaggaagactgaaggacagaatccagccggaaatcctggaagcactgctgaagcacatctcgttcgacaagttcgtccagatctcgctgaaggcactgagaagaatcgtcccgctgatggaacagggaaagagatacgacgaagcatgcgcagaaatctacggagaccactacggaaagaagaacacagaagaaaagatctacctgccgccgatcccggcagacgaaatcagaaacccggtcgtcctgagagcactgtcgcaggcaagaaaggtcatcaacggagtcgtcagaagatacggatcgccggcaagaatccacatcgaaacagcaagagaagtcggaaagtcgttcaaggacagaaaggaaatcgaaaagagacaggaagaaaacagaaaggacagagaaaaggcagcagcaaagttcagagaatacttcccgaacttcgtcggagaaccgaagtcgaaggacatcctgaagctgagactgtacgaacagcagcacggaaagtgcctgtactcgggaaaggaaatcaacctgggaagactgaacgaaaagggatacgtcgaaatcgaccacgcactgccgttctcgagaacatgggacgactcgttcaacaacaaggtcctggtcctgggatcggaaaaccagaacaagggaaaccagacaccgtacgaatacttcaacggaaaggacaactcgagagaatggcaggaattcaaggcaagagtcgaaacatcgagattcccgagatcgaagaagcagagaatcctgctgcagaagttcgacgaagacggattcaaggaaagaaacctgaacgacacaagatacgtcaacagattcctgtgccagttcgtcgcagacagaatgagactgacaggaaagggaaagaagagagtcttcgcatcgaacggacagatcacaaacctgctgagaggattctggggactgagaaaggtcagagcagaaaacgacagacaccacgcactggacgcagtcgtcgtcgcatgctcgacagtcgcaatgcagcagaagatcacaagattcgtcagatacaaggaaatgaacgcattcgacggaaagacaatcgacaaggaaacaggagaagtcctgcaccagaagacacacttcccgcagccgtgggaattcttcgcacaggaagtcatgatcagagtcttcggaaagccggacggaaagccggaattcgaagaagcagacacactggaaaagctgagaacactgctggcagaaaagctgtcgtcgagaccggaagcagtccacgaatacgtcacaccgctgttcgtctcgagagcaccgaacagaaagatgtcgggacagggacacatggaaacagtcaagtcggcaaagagactggacgaaggagtctcggtcctgagagtcccgctgacacagctgaagctgaaggacctggaaaagatggtcaacagagaaagagaaccgaagctgtacgaagcactgaaggcaagactggaagcacacaaggacgacccggcaaaggcattcgcagaaccgttctacaagtacgacaaggcaggaaacagaacacagcaggtcaaggcagtcagagtcgaacaggtccagaagacaggagtctgggtcagaaaccacaacggaatcgcagacaacgcaacaatggtcagagtagacgtcttcgaaaagggagacaagtactacctggtcccgatctactcgtggcaggtcgcaaagggaatcctgccggacagagcagtcgtccagggaaaggacgaagaagactggcagctgatcgacgactcgttcaacttcaagttctcgctgcacccgaacgacctggtcgaagtcatcacaaagaaggcaagaatgttcggatacttcgcatcgtgccacagaggaacaggaaacatcaacatcagaatccacgacctggaccacaagatcggaaagaacggaatcctggaaggaatcggagtcaagacagcactgtcgttccagaagtaccagatcgacgaactgggaaaggaaatcagaccgtgcagactgaagaagagaccgccggtcagatccggaaagagaacagcagacggatcggaattcgaatcgccgaagaagaagagaaaggtcgaatga

SEQ ID NO: 266 - DNA, 3306 bp, Artificial Sequence
  Synthetic: ORF encoding Neisseria meningitidis Cas9 (no start or stop codons; suitable for inclusion in fusion protein coding sequence)
gcagcattcaagccgaactcgatcaactacatcctgggactggacatcggaatcgcatcggtcggatgggcaatggtcgaaatcgacgaagaagaaaacccgatcagactgatcgacctgggagtcagagtcttcgaaagagcagaagtcccgaagacaggagactcgctggcaatggcaagaagactggcaagatcggtcagaagactgacaagaagaagagcacacagactgctgagaacaagaagactgctgaagagagaaggagtcctgcaggcagcaaacttcgacgaaaacggactgatcaagtcgctgccgaacacaccgtggcagctgagagcagcagcactggacagaaagctgacaccgctggaatggtcggcagtcctgctgcacctgatcaagcacagaggatacctgtcgcagagaaagaacgaaggagaaacagcagacaaggaactgggagcactgctgaagggagtcgcaggaaacgcacacgcactgcagacaggagacttcagaacaccggcagaactggcactgaacaagttcgaaaaggaatcgggacacatcagaaaccagagatcggactactcgcacacattctcgagaaaggacctgcaggcagaactgatcctgctgttcgaaaagcagaaggaattcggaaacccgcacgtctcgggaggactgaaggaaggaatcgaaacactgctgatgacacagagaccggcactgtcgggagacgcagtccagaagatgctgggacactgcacattcgaaccggcagaaccgaaggcagcaaagaacacatacacagcagaaagattcatctggctgacaaagctgaacaacctgagaatcctggaacagggatcggaaagaccgctgacagacacagaaagagcaacactgatggacgaaccgtacagaaagtcgaagctgacatacgcacaggcaagaaagctgctgggactggaagacacagcattcttcaagggactgagatacggaaaggacaacgcagaagcatcgacactgatggaaatgaaggcataccacgcaatctcgagagcactggaaaaggaaggactgaaggacaagaagtcgccgctgaacctgtcgccggaactgcaggacgaaatcggaacagcattctcgctgttcaagacagacgaagacatcacaggaagactgaaggacagaatccagccggaaatcctggaagcactgctgaagcacatctcgttcgacaagttcgtccagatctcgctgaaggcactgagaagaatcgtcccgctgatggaacagggaaagagatacgacgaagcatgcgcagaaatctacggagaccactacggaaagaagaacacagaagaaaagatctacctgccgccgatcccggcagacgaaatcagaaacccggtcgtcctgagagcactgtcgcaggcaagaaaggtcatcaacggagtcgtcagaagatacggatcgccggcaagaatccacatcgaaacagcaagagaagtcggaaagtcgttcaaggacagaaaggaaatcgaaaagagacaggaagaaaacagaaaggacagagaaaaggcagcagcaaagttcagagaatacttcccgaacttcgtcggagaaccgaagtcgaaggacatcctgaagctgagactgtacgaacagcagcacggaaagtgcctgtactcgggaaaggaaatcaacctgggaagactgaacgaaaagggatacgtcgaaatcgaccacgcactgccgttctcgagaacatgggacgactcgttcaacaacaaggtcctggtcctgggatcggaaaaccagaacaagggaaaccagacaccgtacgaatacttcaacggaaaggacaactcgagagaatggcaggaattcaaggcaagagtcgaaacatcgagattcccgagatcgaagaagcagagaatcctgctgcagaagttcgacgaagacggattcaaggaaagaaacctgaacgacacaagatacgtcaacagattcctgtgccagttcgtcgcagacagaatgagactgacaggaaagggaaagaagagagtcttcgcatcgaacggacagatcacaaacctgctgagaggattctggggactgagaaaggtcagagcagaaaacgacagacaccacgcactggacgcagtcgtcgtcgcatgctcgacagtcgcaatgcagcagaagatcacaagattcgtcagatacaaggaaatgaacgcattcgacggaaagacaatcgacaaggaaacaggagaagtcctgcaccagaagacacacttcccgcagccgtgggaattcttcgcacaggaagtcatgatcagagtcttcggaaagccggacggaaagccggaattcgaagaagcagacacactggaaaagctgagaacactgctggcagaaaagctgtcgtcgagaccggaagcagtccacgaatacgtcacaccgctgttcgtctcgagagcaccgaacagaaagatgtcgggacagggacacatggaaacagtcaagtcggcaaagagactggacgaaggagtctcggtcctgagagtcccgctgacacagctgaagctgaaggacctggaaaagatggtcaacagagaaagagaaccgaagctgtacgaagcactgaaggcaagactggaagcacacaaggacgacccggcaaaggcattcgcagaaccgttctacaagtacgacaaggcaggaaacagaacacagcaggtcaaggcagtcagagtcgaacaggtccagaagacaggagtctgggtcagaaaccacaacggaatcgcagacaacgcaacaatggtcagagtagacgtcttcgaaaagggagacaagtactacctggtcccgatctactcgtggcaggtcgcaaagggaatcctgccggacagagcagtcgtccagggaaaggacgaagaagactggcagctgatcgacgactcgttcaacttcaagttctcgctgcacccgaacgacctggtcgaagtcatcacaaagaaggcaagaatgttcggatacttcgcatcgtgccacagaggaacaggaaacatcaacatcagaatccacgacctggaccacaagatcggaaagaacggaatcctggaaggaatcggagtcaagacagcactgtcgttccagaagtaccagatcgacgaactgggaaaggaaatcagaccgtgcagactgaagaagagaccgccggtcagatccggaaagagaacagcagacggatcggaattcgaatcgccgaagaagaagagaaaggtcgaa

SEQ ID NO: 267 - DNA, 3636 bp, Artificial Sequence
  Synthetic: Transcript comprising SEQ ID NO: 65 (encoding Neisseria meningitidis Cas9)
gggagacccaagctggctagcgtttaaacttaagcttggatccgccaccatggcagcattcaagccgaactcgatcaactacatcctgggactggacatcggaatcgcatcggtcggatgggcaatggtcgaaatcgacgaagaagaaaacccgatcagactgatcgacctgggagtcagagtcttcgaaagagcagaagtcccgaagacaggagactcgctggcaatggcaagaagactggcaagatcggtcagaagactgacaagaagaagagcacacagactgctgagaacaagaagactgctgaagagagaaggagtcctgcaggcagcaaacttcgacgaaaacggactgatcaagtcgctgccgaacacaccgtggcagctgagagcagcagcactggacagaaagctgacaccgctggaatggtcggcagtcctgctgcacctgatcaagcacagaggatacctgtcgcagagaaagaacgaaggagaaacagcagacaaggaactgggagcactgctgaagggagtcgcaggaaacgcacacgcactgcagacaggagacttcagaacaccggcagaactggcactgaacaagttcgaaaaggaatcgggacacatcagaaaccagagatcggactactcgcacacattctcgagaaaggacctgcaggcagaactgatcctgctgttcgaaaagcagaaggaattcggaaacccgcacgtctcgggaggactgaaggaaggaatcgaaacactgctgatgacacagagaccggcactgtcgggagacgcagtccagaagatgctgggacactgcacattcgaaccggcagaaccgaaggcagcaaagaacacatacacagcagaaagattcatctggctgacaaagctgaacaacctgagaatcctggaacagggatcggaaagaccgctgacagacacagaaagagcaacactgatggacgaaccgtacagaaagtcgaagctgacatacgcacaggcaagaaagctgctgggactggaagacacagcattcttcaagggactgagatacggaaaggacaacgcagaagcatcgacactgatggaaatgaaggcataccacgcaatctcgagagcactggaaaaggaaggactgaaggacaagaagtcgccgctgaacctgtcgccggaactgcaggacgaaatcggaacagcattctcgctgttcaagacagacgaagacatcacaggaagactgaaggacagaatccagccggaaatcctggaagcactgctgaagcacatctcgttcgacaagttcgtccagatctcgctgaaggcactgagaagaatcgtcccgctgatggaacagggaaagagatacgacgaagcatgcgcagaaatctacggagaccactacggaaagaagaacacagaagaaaagatctacctgccgccgatcccggcagacgaaatcagaaacccggtcgtcctgagagcactgtcgcaggcaagaaaggtcatcaacggagtcgtcagaagatacggatcgccggcaagaatccacatcgaaacagcaagagaagtcggaaagtcgttcaaggacagaaaggaaatcgaaaagagacaggaagaaaacagaaaggacagagaaaaggcagcagcaaagttcagagaatacttcccgaacttcgtcggagaaccgaagtcgaaggacatcctgaagctgagactgtacgaacagcagcacggaaagtgcctgtactcgggaaaggaaatcaacctgggaagactgaacgaaaagggatacgtcgaaatcgaccacgcactgccgttctcgagaacatgggacgactcgttcaacaacaaggtcctggtcctgggatcggaaaaccagaacaagggaaaccagacaccgtacgaatacttcaacggaaaggacaactcgagagaatggcaggaattcaaggcaagagtcgaaacatcgagattcccgagatcgaagaagcagagaatcctgctgcagaagttcgacgaagacggattcaaggaaagaaacctgaacgacacaagatacgtcaacagattcctgtgccagttcgtcgcagacagaatgagactgacaggaaagggaaagaagagagtcttcgcatcgaacggacagatcacaaacctgctgagaggattctggggactgagaaaggtcagagcagaaaacgacagacaccacgcactggacgcagtcgtcgtcgcatgctcgacagtcgcaatgcagcagaagatcacaagattcgtcagatacaaggaaatgaacgcattcgacggaaagacaatcgacaaggaaacaggagaagtcctgcaccagaagacacacttcccgcagccgtgggaattcttcgcacaggaagtcatgatcagagtcttcggaaagccggacggaaagccggaattcgaagaagcagacacactggaaaagctgagaacactgctggcagaaaagctgtcgtcgagaccggaagcagtccacgaatacgtcacaccgctgttcgtctcgagagcaccgaacagaaagatgtcgggacagggacacatggaaacagtcaagtcggcaaagagactggacgaaggagtctcggtcctgagagtcccgctgacacagctgaagctgaaggacctggaaaagatggtcaacagagaaagagaaccgaagctgtacgaagcactgaaggcaagactggaagcacacaaggacgacccggcaaaggcattcgcagaaccgttctacaagtacgacaaggcaggaaacagaacacagcaggtcaaggcagtcagagtcgaacaggtccagaagacaggagtctgggtcagaaaccacaacggaatcgcagacaacgcaacaatggtcagagtagacgtcttcgaaaagggagacaagtactacctggtcccgatctactcgtggcaggtcgcaaagggaatcctgccggacagagcagtcgtccagggaaaggacgaagaagactggcagctgatcgacgactcgttcaacttcaagttctcgctgcacccgaacgacctggtcgaagtcatcacaaagaaggcaagaatgttcggatacttcgcatcgtgccacagaggaacaggaaacatcaacatcagaatccacgacctggaccacaagatcggaaagaacggaatcctggaaggaatcggagtcaagacagcactgtcgttccagaagtaccagatcgacgaactgggaaaggaaatcagaccgtgcagactgaagaagagaccgccggtcagatccggaaagagaacagcagacggatcggaattcgaatcgccgaagaagaagagaaaggtcgaatgatagctagctcgagtctagagggcccgtttaaacccgctgatcagcctcgactgtgccttctagttgccagccatctgttgtttgcccctcccccgtgccttccttgaccctggaaggtgccactcccactgtcctttcctaataaaatgaggaaattgcatcgcattgtctgagtaggtgtcattctattctggggggtggggtggggcaggacagcaagggggaggattgggaagacaatagcaggcatgctggggatgcggtgggctctatgg

SEQ ID NO: 268 - protein, 1103 aa, Artificial Sequence
  Synthetic: Amino acid sequence of Neisseria meningitidis Cas9
MAAFKPNSINYILGLDIGIASVGWAMVEIDEEENPIRLIDLGVRVFERAEVPKTGDSLAMARRLARSVRRLTRRRAHRLLRTRRLLKREGVLQAANFDENGLIKSLPNTPWQLRAAALDRKLTPLEWSAVLLHLIKHRGYLSQRKNEGETADKELGALLKGVAGNAHALQTGDFRTPAELALNKFEKESGHIRNQRSDYSHTFSRKDLQAELILLFEKQKEFGNPHVSGGLKEGIETLLMTQRPALSGDAVQKMLGHCTFEPAEPKAAKNTYTAERFIWLTKLNNLRILEQGSERPLTDTERATLMDEPYRKSKLTYAQARKLLGLEDTAFFKGLRYGKDNAEASTLMEMKAYHAISRALEKEGLKDKKSPLNLSPELQDEIGTAFSLFKTDEDITGRLKDRIQPEILEALLKHISFDKFVQISLKALRRIVPLMEQGKRYDEACAEIYGDHYGKKNTEEKIYLPPIPADEIRNPVVLRALSQARKVINGVVRRYGSPARIHIETAREVGKSFKDRKEIEKRQEENRKDREKAAAKFREYFPNFVGEPKSKDILKLRLYEQQHGKCLYSGKEINLGRLNEKGYVEIDHALPFSRTWDDSFNNKVLVLGSENQNKGNQTPYEYFNGKDNSREWQEFKARVETSRFPRSKKQRILLQKFDEDGFKERNLNDTRYVNRFLCQFVADRMRLTGKGKKRVFASNGQITNLLRGFWGLRKVRAENDRHHALDAVVVACSTVAMQQKITRFVRYKEMNAFDGKTIDKETGEVLHQKTHFPQPWEFFAQEVMIRVFGKPDGKPEFEEADTLEKLRTLLAEKLSSRPEAVHEYVTPLFVSRAPNRKMSGQGHMETVKSAKRLDEGVSVLRVPLTQLKLKDLEKMVNREREPKLYEALKARLEAHKDDPAKAFAEPFYKYDKAGNRTQQVKAVRVEQVQKTGVWVRNHNGIADNATMVRVDVFEKGDKYYLVPIYSWQVAKGILPDRAVVQGKDEEDWQLIDDSFNFKFSLHPNDLVEVITKKARMFGYFASCHRGTGNINIRIHDLDHKIGKNGILEGIGVKTALSFQKYQIDELGKEIRPCRLKKRPPVRSGKRTADGSEFESPKKKRKVE

SEQ ID NO: 269 - skipped

SEQ ID NO: 270 - RNA, 100 nt, Artificial Sequence; identical to SEQ ID NO: 114
  Synthetic: G502 guide RNA
  modified_base (1)..(3): 2'-O-Me nucleotide
  modified_base (1)..(4): PS linkage
  modified_base (29)..(40): 2'-O-Me nucleotide
  modified_base (69)..(100): 2'-O-Me nucleotide
  modified_base (97)..(100): PS linkage

SEQ ID NO: 271 - RNA, 100 nt, Artificial Sequence; identical to SEQ ID NO: 121
  Synthetic: G509 guide RNA
  modified_base (1)..(3): 2'-O-Me nucleotide
  modified_base (1)..(4): PS linkage
  modified_base (29)..(40): 2'-O-Me nucleotide
  modified_base (69)..(100): 2'-O-Me nucleotide
  modified_base (97)..(100): PS linkage

SEQ ID NO: 272 - RNA, 100 nt, Artificial Sequence
  Synthetic: G534 guide RNA
  modified_base (1)..(3): 2'-O-Me nucleotide
  modified_base (1)..(4): PS linkage
  modified_base (29)..(40): 2'-O-Me nucleotide
  modified_base (69)..(100): 2'-O-Me nucleotide
  modified_base (97)..(100): PS linkage
acgcaaauaucaguccagcgguuuuagagcuagaaauagcaaguuaaaauaaggcuaguccguuaucaacuugaaaaaguggcaccgagucggugcuuuu

SEQ ID NO: 273 - DNA, 3783 bp, Artificial Sequence
  Synthetic: DNA coding sequence of eGFP
tcgcgcgtttcggtgatgacggtgaaaacctctgacacatgcagctcccggagacggtcacagcttgtctgtaagcggatgccgggagcagacaagcccgtcagggcgcgtcagcgggtgttggcgggtgtcggggctggcttaactatgcggcatcagagcagattgtactgagagtgcaccatatgcggtgtgaaataccgcacagatgcgtaaggagaaaataccgcatcaggcgccattcgccattcaggctgcgcaactgttgggaagggcgatcggtgcgggcctcttcgctattacgccagctggcgaaagggggatgtgctgcaaggcgattaagttgggtaacgccagggttttcccagtcacgacgttgtaaaacgacggccagtgaattctaatacgactcactatagggtcccgcagtcggcgtccagcggctctgcttgttcgtgtgtgtgtcgttgcaggccttattcggatccatggtgagcaagggcgaggagctgttcaccggggtggtgcccatcctggtcgagctggacggcgacgtaaacggccacaagttcagcgtgtccggcgagggcgagggcgatgccacctacggcaagctgaccctgaagttcatctgcaccaccggcaagctgcccgtgccctggcccaccctcgtgaccaccctgacctacggcgtgcagtgcttcagccgctaccccgaccacatgaagcagcacgacttcttcaagtccgccatgcccgaaggctacgtccaggagcgcaccatcttcttcaaggacgacggcaactacaagacccgcgccgaggtgaagttcgagggcgacaccctggtgaaccgcatcgagctgaagggcatcgacttcaaggaggacggcaacatcctggggcacaagctggagtacaactacaacagccacaacgtctatatcatggccgacaagcagaagaacggcatcaaggtgaacttcaagatccgccacaacatcgaggacggcagcgtgcagctcgccgaccactaccagcagaacacccccatcggcgacggccccgtgctgctgcccgacaaccactacctgagcacccagtccgccctgagcaaagaccccaacgagaagcgcgatcacatggtcctgctggagttcgtgaccgccgccgggatcactctcggcatggacgagctgtacaagtaataggaattatgcagtctagccatcacatttaaaagcatctcagcctaccatgagaataagagaaagaaaatgaagatcaatagcttattcatctctttttctttttcgttggtgtaaagccaacaccctgtctaaaaaacataaatttctttaatcattttgcctcttttctctgtgcttcaattaataaaaaatggaaagaacctcgagaaaaaaaaaaaaaaaaaaaaaaaaaaaaaaaaaaaaaaaaaaaaaaaaaaaaaaaaaaaaaaaaaaaaaaaaaaaaaaaaaaaaaaaaaaaaaaaaaaaatctagacttaagcttgatgagctctagcttggcgtaatcatggtcatagctgtttcctgtgtgaaattgttatccgctcacaattccacacaacatacgagccggaagcataaagtgtaaagcctggggtgcctaatgagtgagctaactcacattaattgcgttgcgctcactgcccgctttccagtcgggaaacctgtcgtgccagctgcattaatgaatcggccaacgcgcggggagaggcggtttgcgtattgggcgctcttccgcttcctcgctcactgactcgctgcgctcggtcgttcggctgcggcgagcggtatcagctcactcaaaggcggtaatacggttatccacagaatcaggggataacgcaggaaagaacatgtgagcaaaaggccagcaaaaggccaggaaccgtaaaaaggccgcgttgctggcgtttttccataggctccgcccccctgacgagcatcacaaaaatcgacgctcaagtcagaggtggcgaaacccgacaggactataaagataccaggcgtttccccctggaagctccctcgtgcgctctcctgttccgaccctgccgcttaccggatacctgtccgcctttctcccttcgggaagcgtggcgctttctcatagctcacgctgtaggtatctcagttcggtgtaggtcgttcgctccaagctgggctgtgtgcacgaaccccccgttcagcccgaccgctgcgccttatccggtaactatcgtcttgagtccaacccggtaagacacgacttatcgccactggcagcagccactggtaacaggattagcagagcgaggtatgtaggcggtgctacagagttcttgaagtggtggcctaactacggctacactagaagaacagtatttggtatctgcgctctgctgaagccagttaccttcggaaaaagagttggtagctcttgatccggcaaacaaaccaccgctggtagcggtggtttttttgtttgcaagcagcagattacgcgcagaaaaaaaggatctcaagaagatcctttgatcttttctacggggtctgacgctcagtggaacgaaaactcacgttaagggattttggtcatgagattatcaaaaaggatcttcacctagatccttttaaattaaaaatgaagttttaaatcaatctaaagtatatatgagtaaacttggtctgacagttaccaatgcttaatcagtgaggcacctatctcagcgatctgtctatttcgttcatccatagttgcctgactccccgtcgtgtagataactacgatacgggagggcttaccatctggccccagtgctgcaatgataccgcgagacccacgctcaccggctccagatttatcagcaataaaccagccagccggaagggccgagcgcagaagtggtcctgcaactttatccgcctccatccagtctattaattgttgccgggaagctagagtaagtagttcgccagttaatagtttgcgcaacgttgttgccattgctacaggcatcgtggtgtcacgctcgtcgtttggtatggcttcattcagctccggttcccaacgatcaaggcgagttacatgatcccccatgttgtgcaaaaaagcggttagctccttcggtcctccgatcgttgtcagaagtaagttggccgcagtgttatcactcatggttatggcagcactgcataattctcttactgtcatgccatccgtaagatgcttttctgtgactggtgagtactcaaccaagtcattctgagaatagtgtatgcggcgaccgagttgctcttgcccggcgtcaatacgggataataccgcgccacatagcagaactttaaaagtgctcatcattggaaaacgttcttcggggcgaaaactctcaaggatcttaccgctgttgagatccagttcgatgtaacccactcgtgcacccaactgatcttcagcatcttttactttcaccagcgtttctgggtgagcaaaaacaggaaggcaaaatgccgcaaaaaagggaataagggcgacacggaaatgttgaatactcatactcttcctttttcaatattattgaagcatttatcagggttattgtctcatgagcggatacatatttgaatgtatttagaaaaataaacaaataggggttccgcgcacatttccccgaaaagtgccacctgacgtctaagaaaccattattatcatgacattaacctataaaaataggcgtatcacgaggccctttcgtcg

SEQ ID NO: 274 - skipped

SEQ ID NO: 275 - DNA, 42 bp, Artificial Sequence
  Synthetic: CMV-1 5 UTR
cagatcgcctggagacgccatccacgctgttttgacctccat

SEQ ID NO: 276 - DNA, 42 bp, Artificial Sequence
  Synthetic: CMV-2 5 UTR
agaagacaccgggaccgatccagcctccgcggccgggaacgg

SEQ ID NO: 277 - DNA, 42 bp, Artificial Sequence
  Synthetic: CMV-3 5 UTR
tgcattggaacgcggattccccgtgccaagagtgactcaccg

SEQ ID NO: 278 - protein, 7 aa, Artificial Sequence
  Synthetic: SV40 NLS
PKKKRKV

SEQ ID NO: 279 - protein, 9 aa, Artificial Sequence
  Synthetic: Exemplary NLS 1
LAAKRSRTT

SEQ ID NO: 280 - protein, 9 aa, Artificial Sequence
  Synthetic: Exemplary NLS 2
QAAKRSRTT

SEQ ID NO: 281 - protein, 10 aa, Artificial Sequence
  Synthetic: Exemplary NLS 3
PAPAKRERTT

SEQ ID NO: 282 - protein, 9 aa, Artificial Sequence
  Synthetic: Exemplary NLS 4
QAAKRPRTT

SEQ ID NO: 283 - protein, 9 aa, Artificial Sequence
  Synthetic: Exemplary NLS 5
RAAKRPRTT

SEQ ID NO: 284 - protein, 11 aa, Artificial Sequence
  Synthetic: Exemplary NLS 6
AAAKRSWSMAA

SEQ ID NO: 285 - protein, 11 aa, Artificial Sequence
  Synthetic: Exemplary NLS 7
AAAKRVWSMAF

SEQ ID NO: 286 - protein, 11 aa, Artificial Sequence
  Synthetic: Exemplary NLS 8
AAAKRSWSMAF

SEQ ID NO: 287 - protein, 10 aa, Artificial Sequence
  Synthetic: Exemplary NLS 9
AAAKRKYFAA

SEQ ID NO: 288 - protein, 10 aa, Artificial Sequence
  Synthetic: Exemplary NLS 10
RAAKRKAFAA

SEQ ID NO: 289 - protein, 10 aa, Artificial Sequence
  Synthetic: Exemplary NLS 11
RAAKRKYFAV

SEQ ID NO: 290 - protein, 7 aa, Artificial Sequence
  Synthetic: Alternate SV40 NLS
PKKKRRV

SEQ ID NO: 291 - protein, 16 aa, Artificial Sequence
  Synthetic: Nucleoplasmin NLS
KRPAATKKAGQAKKKK

SEQ ID NO: 292 - DNA, 21 bp, Artificial Sequence
  Synthetic: Exemplary coding sequence for SV40 NLS
ccgaagaagaagagaaaggtc

SEQ ID NO: 293 - DNA, 27 bp, Artificial Sequence
  Synthetic: Exemplary coding sequence for NLS1
ctggcagcaaagagaagcagaacaaca

SEQ ID NO: 294 - DNA, 27 bp, Artificial Sequence
  Synthetic: Exemplary coding sequence for NLS2
caggcagcaaagagaagcagaacaaca

SEQ ID NO: 295 - DNA, 30 bp, Artificial Sequence
  Synthetic: Exemplary coding sequence for NLS3
ccggcaccggcaaagagagaaagaacaaca

SEQ ID NO: 296 - DNA, 27 bp, Artificial Sequence
  Synthetic: Exemplary coding sequence for NLS4
caggcagcaaagagaccgagaacaaca

SEQ ID NO: 297 - DNA, 27 bp, Artificial Sequence
  Synthetic: Exemplary coding sequence for NLS5
agagcagcaaagagaccgagaacaaca

SEQ ID NO: 298 - DNA, 33 bp, Artificial Sequence
  Synthetic: Exemplary coding sequence for NLS6
gcagcagcaaagagaagctggagcatggcagca

SEQ ID NO: 299 - DNA, 33 bp, Artificial Sequence
  Synthetic: Exemplary coding sequence for NLS7
gcagcagcaaagagagtctggagcatggcattc

SEQ ID NO: 300 - DNA, 33 bp, Artificial Sequence
  Synthetic: Exemplary coding sequence for NLS8
gcagcagcaaagagaagctggagcatggcattc

SEQ ID NO: 301 - DNA, 30 bp, Artificial Sequence
  Synthetic: Exemplary coding sequence for NLS9
gcagcagcaaagagaaagtacttcgcagca

SEQ ID NO: 302 - DNA, 30 bp, Artificial Sequence
  Synthetic: Exemplary coding sequence for NLS10
agagcagcaaagagaaaggcattcgcagca

SEQ ID NO: 303 - DNA, 30 bp, Artificial Sequence
  Synthetic: Exemplary coding sequence for NLS11
agagcagcaaagagaaagtacttcgcagtc

SEQ ID NO: 304 - DNA, 21 bp, Artificial Sequence
  Synthetic: Exemplary coding sequence for alternate SV40 NLS
ccgaagaagaagagaagagtc

SEQ ID NO: 305 - RNA, 13 nt, Artificial Sequence
  Synthetic: exemplary Kozak sequence
gccgccrccaugg

SEQ ID NO: 306 - skipped

SEQ ID NO: 307 - DNA, 4140 bp, Artificial Sequence
  Synthetic: Cas9 ORF using long half life codons of Table 4, with start and stop codons
atggacaagaagtactctatcggtttggacatcggtaccaactctgtcggttgggccgtcatcaccgacgaatacaaggtcccatctaagaagttcaaggtcttgggtaacaccgacagacactctatcaagaagaacttgatcggtgccttgttgttcgactctggtgaaaccgccgaagccaccagattgaagagaaccgccagaagaagatacaccagaagaaagaacagaatctgctacttgcaagaaatcttctctaacgaaatggccaaggtcgacgactctttcttccacagattggaagaatctttcttggtcgaagaagacaagaagcacgaaagacacccaatcttcggtaacatcgtcgacgaagtcgcctaccacgaaaagtacccaaccatctaccacttgagaaagaagttggtcgactctaccgacaaggccgacttgagattgatctacttggccttggcccacatgatcaagttcagaggtcacttcttgatcgaaggtgacttgaacccagacaactctgacgtcgacaagttgttcatccaattggtccaaacctacaaccaattgttcgaagaaaacccaatcaacgcctctggtgtcgacgccaaggccatcttgtctgccagattgtctaagagcagaagattggaaaacttgatcgcccaattgccaggtgaaaagaagaacggtttgttcggtaacttgatcgccttgtctttgggtttgaccccaaacttcaagtctaacttcgacttggccgaagacgccaagttgcaattgtctaaggacacctacgacgacgacttggacaacttgttggcccaaatcggtgaccaatacgccgacttgttcttggccgccaagaacttgtctgacgccatcttgttgtctgacatcttgagagtcaacaccgaaatcaccaaggccccattgtctgcctctatgatcaagagatacgacgaacaccaccaagacttgaccttgttgaaggccttggtcagacaacaattgccagaaaagtacaaggaaatcttcttcgaccaatctaagaacggttacgccggttacatcgacggtggtgcctctcaagaagaattctacaagttcatcaagccaatcttggaaaagatggacggtaccgaagaattgttggtcaagttgaacagagaagacttgttgagaaagcaaagaaccttcgacaacggttctatcccacaccaaatccacttgggtgaattgcacgccatcttgagaagacaagaagacttctacccattcttgaaggacaacagagaaaagatcgaaaagatcttgaccttcagaatcccatactacgtcggtccattggccagaggtaacagcagattcgcctggatgaccagaaagtctgaagaaaccatcaccccatggaacttcgaagaagtcgtcgacaagggtgcctctgcccaatctttcatcgaaagaatgaccaacttcgacaagaacttgccaaacgaaaaggtcttgccaaagcactctttgttgtacgaatacttcaccgtctacaacgaattgaccaaggtcaagtacgtcaccgaaggtatgagaaagccagccttcttgtctggtgaacaaaagaaggccatcgtcgacttgttgttcaagaccaacagaaaggtcaccgtcaagcaattgaaggaagactacttcaagaagatcgaatgcttcgactctgtcgaaatctctggtgtcgaagacagattcaacgcctctttgggtacctaccacgacttgttgaagatcatcaaggacaaggacttcttggacaacgaagaaaacgaagacatcttggaagacatcgtcttgaccttgaccttgttcgaagacagagaaatgatcgaagaaagattgaagacctacgcccacttgttcgacgacaaggtcatgaagcaattgaagagaagaagatacaccggttggggtagattgagcagaaagttgatcaacggtatcagagacaagcaatctggtaagaccatcttggacttcttgaagtctgacggtttcgccaacagaaacttcatgcaattgatccacgacgactctttgaccttcaaggaagacatccaaaaggcccaagtctctggtcaaggtgactctttgcacgaacacatcgccaacttggccggttctccagccatcaagaagggtatcttgcaaaccgtcaaggtcgtcgacgaattggtcaaggtcatgggtagacacaagccagaaaacatcgtcatcgaaatggccagagaaaaccaaaccacccaaaagggtcaaaagaacagcagagaaagaatgaagagaatcgaagaaggtatcaaggaattgggttctcaaatcttgaaggaacacccagtcgaaaacacccaattgcaaaacgaaaagttgtacttgtactacttgcaaaacggtagagacatgtacgtcgaccaagaattggacatcaacagattgtctgactacgacgtcgaccacatcgtcccacaatctttcttgaaggacgactctatcgacaacaaggtcttgaccagatctgacaagaacagaggtaagtctgacaacgtcccatctgaagaagtcgtcaagaagatgaagaactactggagacaattgttgaacgccaagttgatcacccaaagaaagttcgacaacttgaccaaggccgaaagaggtggtttgtctgaattggacaaggccggtttcatcaagagacaattggtcgaaaccagacaaatcaccaagcacgtcgcccaaatcttggacagcagaatgaacaccaagtacgacgaaaacgacaagttgatcagagaagtcaaggtcatcaccttgaagtctaagttggtctctgacttcagaaaggacttccaattctacaaggtcagagaaatcaacaactaccaccacgcccacgacgcctacttgaacgccgtcgtcggtaccgccttgatcaagaagtacccaaagttggaatctgaattcgtctacggtgactacaaggtctacgacgtcagaaagatgatcgccaagtctgaacaagaaatcggtaaggccaccgccaagtacttcttctactctaacatcatgaacttcttcaagaccgaaatcaccttggccaacggtgaaatcagaaagagaccattgatcgaaaccaacggtgaaaccggtgaaatcgtctgggacaagggtagagacttcgccaccgtcagaaaggtcttgtctatgccacaagtcaacatcgtcaagaagaccgaagtccaaaccggtggtttctctaaggaatctatcttgccaaagagaaactctgacaagttgatcgccagaaagaaggactgggacccaaagaagtacggtggtttcgactctccaaccgtcgcctactctgtcttggtcgtcgccaaggtcgaaaagggtaagtctaagaagttgaagtctgtcaaggaattgttgggtatcaccatcatggaaagatcttctttcgaaaagaacccaatcgacttcttggaagccaagggttacaaggaagtcaagaaggacttgatcatcaagttgccaaagtactctttgttcgaattggaaaacggtagaaagagaatgttggcctctgccggtgaattgcaaaagggtaacgaattggccttgccatctaagtacgtcaacttcttgtacttggcctctcactacgaaaagttgaagggttctccagaagacaacgaacaaaagcaattgttcgtcgaacaacacaagcactacttggacgaaatcatcgaacaaatctctgaattctctaagagagtcatcttggccgacgccaacttggacaaggtcttgtctgcctacaacaagcacagagacaagccaatcagagaacaagccgaaaacatcatccacttgttcaccttgaccaacttgggtgccccagccgccttcaagtacttcgacaccaccatcgacagaaagagatacacctctaccaaggaagtcttggacgccaccttgatccaccaatctatcaccggtttgtacgaaaccagaatcgacttgtctcaattgggtggtgacggtggtggttctccaaagaagaagagaaaggtctaa

SEQ ID NO: 308 - DNA, 4140 bp, Artificial Sequence
  Synthetic: Cas9 ORF using U rich codons of Table 4, with start and stop codons
atggataaaaaatattctattggtttagatattggtactaattctgttggttgggctgttattactgatgaatataaagttccttctaaaaaatttaaagttttaggtaatactgatcgtcattctattaaaaaaaatttaattggtgctttattatttgattctggtgaaactgctgaagctactcgtttaaaacgtactgctcgtcgtcgttatactcgtcgtaaaaatcgtatttgttatttacaagaaattttttctaatgaaatggctaaagttgatgattctttttttcatcgtttagaagaatcttttttagttgaagaagataaaaaacatgaacgtcatcctatttttggtaatattgttgatgaagttgcttatcatgaaaaatatcctactatttatcatttacgtaaaaaattagttgattctactgataaagctgatttacgtttaatttatttagctttagctcatatgattaaatttcgtggtcattttttaattgaaggtgatttaaatcctgataattctgatgttgataaattatttattcaattagttcaaacttataatcaattatttgaagaaaatcctattaatgcttctggtgttgatgctaaagctattttatctgctcgtttatctaaatctcgtcgtttagaaaatttaattgctcaattacctggtgaaaaaaaaaatggtttatttggtaatttaattgctttatctttaggtttaactcctaattttaaatctaattttgatttagctgaagatgctaaattacaattatctaaagatacttatgatgatgatttagataatttattagctcaaattggtgatcaatatgctgatttatttttagctgctaaaaatttatctgatgctattttattatctgatattttacgtgttaatactgaaattactaaagctcctttatctgcttctatgattaaacgttatgatgaacatcatcaagatttaactttattaaaagctttagttcgtcaacaattacctgaaaaatataaagaaattttttttgatcaatctaaaaatggttatgctggttatattgatggtggtgcttctcaagaagaattttataaatttattaaacctattttagaaaaaatggatggtactgaagaattattagttaaattaaatcgtgaagatttattacgtaaacaacgtacttttgataatggttctattcctcatcaaattcatttaggtgaattacatgctattttacgtcgtcaagaagatttttatccttttttaaaagataatcgtgaaaaaattgaaaaaattttaacttttcgtattccttattatgttggtcctttagctcgtggtaattctcgttttgcttggatgactcgtaaatctgaagaaactattactccttggaattttgaagaagttgttgataaaggtgcttctgctcaatcttttattgaacgtatgactaattttgataaaaatttacctaatgaaaaagttttacctaaacattctttattatatgaatattttactgtttataatgaattaactaaagttaaatatgttactgaaggtatgcgtaaacctgcttttttatctggtgaacaaaaaaaagctattgttgatttattatttaaaactaatcgtaaagttactgttaaacaattaaaagaagattattttaaaaaaattgaatgttttgattctgttgaaatttctggtgttgaagatcgttttaatgcttctttaggtacttatcatgatttattaaaaattattaaagataaagattttttagataatgaagaaaatgaagatattttagaagatattgttttaactttaactttatttgaagatcgtgaaatgattgaagaacgtttaaaaacttatgctcatttatttgatgataaagttatgaaacaattaaaacgtcgtcgttatactggttggggtcgtttatctcgtaaattaattaatggtattcgtgataaacaatctggtaaaactattttagattttttaaaatctgatggttttgctaatcgtaattttatgcaattaattcatgatgattctttaacttttaaagaagatattcaaaaagctcaagtttctggtcaaggtgattctttacatgaacatattgctaatttagctggttctcctgctattaaaaaaggtattttacaaactgttaaagttgttgatgaattagttaaagttatgggtcgtcataaacctgaaaatattgttattgaaatggctcgtgaaaatcaaactactcaaaaaggtcaaaaaaattctcgtgaacgtatgaaacgtattgaagaaggtattaaagaattaggttctcaaattttaaaagaacatcctgttgaaaatactcaattacaaaatgaaaaattatatttatattatttacaaaatggtcgtgatatgtatgttgatcaagaattagatattaatcgtttatctgattatgatgttgatcatattgttcctcaatcttttttaaaagatgattctattgataataaagttttaactcgttctgataaaaatcgtggtaaatctgataatgttccttctgaagaagttgttaaaaaaatgaaaaattattggcgtcaattattaaatgctaaattaattactcaacgtaaatttgataatttaactaaagctgaacgtggtggtttatctgaattagataaagctggttttattaaacgtcaattagttgaaactcgtcaaattactaaacatgttgctcaaattttagattctcgtatgaatactaaatatgatgaaaatgataaattaattcgtgaagttaaagttattactttaaaatctaaattagtttctgattttcgtaaagattttcaattttataaagttcgtgaaattaataattatcatcatgctcatgatgcttatttaaatgctgttgttggtactgctttaattaaaaaatatcctaaattagaatctgaatttgtttatggtgattataaagtttatgatgttcgtaaaatgattgctaaatctgaacaagaaattggtaaagctactgctaaatattttttttattctaatattatgaatttttttaaaactgaaattactttagctaatggtgaaattcgtaaacgtcctttaattgaaactaatggtgaaactggtgaaattgtttgggataaaggtcgtgattttgctactgttcgtaaagttttatctatgcctcaagttaatattgttaaaaaaactgaagttcaaactggtggtttttctaaagaatctattttacctaaacgtaattctgataaattaattgctcgtaaaaaagattgggatcctaaaaaatatggtggttttgattctcctactgttgcttattctgttttagttgttgctaaagttgaaaaaggtaaatctaaaaaattaaaatctgttaaagaattattaggtattactattatggaacgttcttcttttgaaaaaaatcctattgattttttagaagctaaaggttataaagaagttaaaaaagatttaattattaaattacctaaatattctttatttgaattagaaaatggtcgtaaacgtatgttagcttctgctggtgaattacaaaaaggtaatgaattagctttaccttctaaatatgttaattttttatatttagcttctcattatgaaaaattaaaaggttctcctgaagataatgaacaaaaacaattatttgttgaacaacataaacattatttagatgaaattattgaacaaatttctgaattttctaaacgtgttattttagctgatgctaatttagataaagttttatctgcttataataaacatcgtgataaacctattcgtgaacaagctgaaaatattattcatttatttactttaactaatttaggtgctcctgctgcttttaaatattttgatactactattgatcgtaaacgttatacttctactaaagaagttttagatgctactttaattcatcaatctattactggtttatatgaaactcgtattgatttatctcaattaggtggtgatggtggtggttctcctaaaaaaaaacgtaaagtttga

SEQ ID NO: 309 - DNA, 4140 bp, Artificial Sequence
  Synthetic: Cas9 ORF using low G codons of Table 4, with start and stop codons
atggacaaaaaatactccatcggcctcgacatcggcaccaactccgtcggctgggccgtcatcaccgacgaatacaaagtcccctccaaaaaattcaaagtcctcggcaacaccgacagacactccatcaaaaaaaacctcatcggcgccctcctcttcgactccggcgaaaccgccgaagccaccagactcaaaagaaccgccagaagaagatacaccagaagaaaaaacagaatctgctacctccaagaaatcttctccaacgaaatggccaaagtcgacgactccttcttccacagactcgaagaatccttcctcgtcgaagaagacaaaaaacacgaaagacaccccatcttcggcaacatcgtcgacgaagtcgcctaccacgaaaaataccccaccatctaccacctcagaaaaaaactcgtcgactccaccgacaaagccgacctcagactcatctacctcgccctcgcccacatgatcaaattcagaggccacttcctcatcgaaggcgacctcaaccccgacaactccgacgtcgacaaactcttcatccaactcgtccaaacctacaaccaactcttcgaagaaaaccccatcaacgcctccggcgtcgacgccaaagccatcctctccgccagactctccaaatccagaagactcgaaaacctcatcgcccaactccccggcgaaaaaaaaaacggcctcttcggcaacctcatcgccctctccctcggcctcacccccaacttcaaatccaacttcgacctcgccgaagacgccaaactccaactctccaaagacacctacgacgacgacctcgacaacctcctcgcccaaatcggcgaccaatacgccgacctcttcctcgccgccaaaaacctctccgacgccatcctcctctccgacatcctcagagtcaacaccgaaatcaccaaagcccccctctccgcctccatgatcaaaagatacgacgaacaccaccaagacctcaccctcctcaaagccctcgtcagacaacaactccccgaaaaatacaaagaaatcttcttcgaccaatccaaaaacggctacgccggctacatcgacggcggcgcctcccaagaagaattctacaaattcatcaaacccatcctcgaaaaaatggacggcaccgaagaactcctcgtcaaactcaacagagaagacctcctcagaaaacaaagaaccttcgacaacggctccatcccccaccaaatccacctcggcgaactccacgccatcctcagaagacaagaagacttctaccccttcctcaaagacaacagagaaaaaatcgaaaaaatcctcaccttcagaatcccctactacgtcggccccctcgccagaggcaactccagattcgcctggatgaccagaaaatccgaagaaaccatcaccccctggaacttcgaagaagtcgtcgacaaaggcgcctccgcccaatccttcatcgaaagaatgaccaacttcgacaaaaacctccccaacgaaaaagtcctccccaaacactccctcctctacgaatacttcaccgtctacaacgaactcaccaaagtcaaatacgtcaccgaaggcatgagaaaacccgccttcctctccggcgaacaaaaaaaagccatcgtcgacctcctcttcaaaaccaacagaaaagtcaccgtcaaacaactcaaagaagactacttcaaaaaaatcgaatgcttcgactccgtcgaaatctccggcgtcgaagacagattcaacgcctccctcggcacctaccacgacctcctcaaaatcatcaaagacaaagacttcctcgacaacgaagaaaacgaagacatcctcgaagacatcgtcctcaccctcaccctcttcgaagacagagaaatgatcgaagaaagactcaaaacctacgcccacctcttcgacgacaaagtcatgaaacaactcaaaagaagaagatacaccggctggggcagactctccagaaaactcatcaacggcatcagagacaaacaatccggcaaaaccatcctcgacttcctcaaatccgacggcttcgccaacagaaacttcatgcaactcatccacgacgactccctcaccttcaaagaagacatccaaaaagcccaagtctccggccaaggcgactccctccacgaacacatcgccaacctcgccggctcccccgccatcaaaaaaggcatcctccaaaccgtcaaagtcgtcgacgaactcgtcaaagtcatgggcagacacaaacccgaaaacatcgtcatcgaaatggccagagaaaaccaaaccacccaaaaaggccaaaaaaactccagagaaagaatgaaaagaatcgaagaaggcatcaaagaactcggctcccaaatcctcaaagaacaccccgtcgaaaacacccaactccaaaacgaaaaactctacctctactacctccaaaacggcagagacatgtacgtcgaccaagaactcgacatcaacagactctccgactacgacgtcgaccacatcgtcccccaatccttcctcaaagacgactccatcgacaacaaagtcctcaccagatccgacaaaaacagaggcaaatccgacaacgtcccctccgaagaagtcgtcaaaaaaatgaaaaactactggagacaactcctcaacgccaaactcatcacccaaagaaaattcgacaacctcaccaaagccgaaagaggcggcctctccgaactcgacaaagccggcttcatcaaaagacaactcgtcgaaaccagacaaatcaccaaacacgtcgcccaaatcctcgactccagaatgaacaccaaatacgacgaaaacgacaaactcatcagagaagtcaaagtcatcaccctcaaatccaaactcgtctccgacttcagaaaagacttccaattctacaaagtcagagaaatcaacaactaccaccacgcccacgacgcctacctcaacgccgtcgtcggcaccgccctcatcaaaaaataccccaaactcgaatccgaattcgtctacggcgactacaaagtctacgacgtcagaaaaatgatcgccaaatccgaacaagaaatcggcaaagccaccgccaaatacttcttctactccaacatcatgaacttcttcaaaaccgaaatcaccctcgccaacggcgaaatcagaaaaagacccctcatcgaaaccaacggcgaaaccggcgaaatcgtctgggacaaaggcagagacttcgccaccgtcagaaaagtcctctccatgccccaagtcaacatcgtcaaaaaaaccgaagtccaaaccggcggcttctccaaagaatccatcctccccaaaagaaactccgacaaactcatcgccagaaaaaaagactgggaccccaaaaaatacggcggcttcgactcccccaccgtcgcctactccgtcctcgtcgtcgccaaagtcgaaaaaggcaaatccaaaaaactcaaatccgtcaaagaactcctcggcatcaccatcatggaaagatcctccttcgaaaaaaaccccatcgacttcctcgaagccaaaggctacaaagaagtcaaaaaagacctcatcatcaaactccccaaatactccctcttcgaactcgaaaacggcagaaaaagaatgctcgcctccgccggcgaactccaaaaaggcaacgaactcgccctcccctccaaatacgtcaacttcctctacctcgcctcccactacgaaaaactcaaaggctcccccgaagacaacgaacaaaaacaactcttcgtcgaacaacacaaacactacctcgacgaaatcatcgaacaaatctccgaattctccaaaagagtcatcctcgccgacgccaacctcgacaaagtcctctccgcctacaacaaacacagagacaaacccatcagagaacaagccgaaaacatcatccacctcttcaccctcaccaacctcggcgcccccgccgccttcaaatacttcgacaccaccatcgacagaaaaagatacacctccaccaaagaagtcctcgacgccaccctcatccaccaatccatcaccggcctctacgaaaccagaatcgacctctcccaactcggcggcgacggcggcggctcccccaaaaaaaaaagaaaagtctga

SEQ ID NO: 310 - DNA, 4140 bp, Artificial Sequence
  Synthetic: Cas9 ORF using low C codons of Table 4, with start and stop codons
atggataagaagtatagtattggattggatattggaacaaatagtgtgggatgggctgtgattacagatgagtataaggtgcctagtaagaagtttaaggtgttgggaaatacagatagacatagtattaagaagaatttgattggagctttgttgtttgatagtggagagacagctgaggctacaagattgaagagaacagctagaagaagatatacaagaagaaagaatagaatttgttatttgcaggagatttttagtaatgagatggctaaggtggatgatagtttttttcatagattggaggagagttttttggtggaggaggataagaagcatgagagacatcctatttttggaaatattgtggatgaggtggcttatcatgagaagtatcctacaatttatcatttgagaaagaagttggtggatagtacagataaggctgatttgagattgatttatttggctttggctcatatgattaagtttagaggacattttttgattgagggagatttgaatcctgataatagtgatgtggataagttgtttattcagttggtgcagacatataatcagttgtttgaggagaatcctattaatgctagtggagtggatgctaaggctattttgagtgctagattgagtaagagtagaagattggagaatttgattgctcagttgcctggagagaagaagaatggattgtttggaaatttgattgctttgagtttgggattgacacctaattttaagagtaattttgatttggctgaggatgctaagttgcagttgagtaaggatacatatgatgatgatttggataatttgttggctcagattggagatcagtatgctgatttgtttttggctgctaagaatttgagtgatgctattttgttgagtgatattttgagagtgaatacagagattacaaaggctcctttgagtgctagtatgattaagagatatgatgagcatcatcaggatttgacattgttgaaggctttggtgagacagcagttgcctgagaagtataaggagattttttttgatcagagtaagaatggatatgctggatatattgatggaggagctagtcaggaggagttttataagtttattaagcctattttggagaagatggatggaacagaggagttgttggtgaagttgaatagagaggatttgttgagaaagcagagaacatttgataatggaagtattcctcatcagattcatttgggagagttgcatgctattttgagaagacaggaggatttttatccttttttgaaggataatagagagaagattgagaagattttgacatttagaattccttattatgtgggacctttggctagaggaaatagtagatttgcttggatgacaagaaagagtgaggagacaattacaccttggaattttgaggaggtggtggataagggagctagtgctcagagttttattgagagaatgacaaattttgataagaatttgcctaatgagaaggtgttgcctaagcatagtttgttgtatgagtattttacagtgtataatgagttgacaaaggtgaagtatgtgacagagggaatgagaaagcctgcttttttgagtggagagcagaagaaggctattgtggatttgttgtttaagacaaatagaaaggtgacagtgaagcagttgaaggaggattattttaagaagattgagtgttttgatagtgtggagattagtggagtggaggatagatttaatgctagtttgggaacatatcatgatttgttgaagattattaaggataaggattttttggataatgaggagaatgaggatattttggaggatattgtgttgacattgacattgtttgaggatagagagatgattgaggagagattgaagacatatgctcatttgtttgatgataaggtgatgaagcagttgaagagaagaagatatacaggatggggaagattgagtagaaagttgattaatggaattagagataagcagagtggaaagacaattttggattttttgaagagtgatggatttgctaatagaaattttatgcagttgattcatgatgatagtttgacatttaaggaggatattcagaaggctcaggtgagtggacagggagatagtttgcatgagcatattgctaatttggctggaagtcctgctattaagaagggaattttgcagacagtgaaggtggtggatgagttggtgaaggtgatgggaagacataagcctgagaatattgtgattgagatggctagagagaatcagacaacacagaagggacagaagaatagtagagagagaatgaagagaattgaggagggaattaaggagttgggaagtcagattttgaaggagcatcctgtggagaatacacagttgcagaatgagaagttgtatttgtattatttgcagaatggaagagatatgtatgtggatcaggagttggatattaatagattgagtgattatgatgtggatcatattgtgcctcagagttttttgaaggatgatagtattgataataaggtgttgacaagaagtgataagaatagaggaaagagtgataatgtgcctagtgaggaggtggtgaagaagatgaagaattattggagacagttgttgaatgctaagttgattacacagagaaagtttgataatttgacaaaggctgagagaggaggattgagtgagttggataaggctggatttattaagagacagttggtggagacaagacagattacaaagcatgtggctcagattttggatagtagaatgaatacaaagtatgatgagaatgataagttgattagagaggtgaaggtgattacattgaagagtaagttggtgagtgattttagaaaggattttcagttttataaggtgagagagattaataattatcatcatgctcatgatgcttatttgaatgctgtggtgggaacagctttgattaagaagtatcctaagttggagagtgagtttgtgtatggagattataaggtgtatgatgtgagaaagatgattgctaagagtgagcaggagattggaaaggctacagctaagtattttttttatagtaatattatgaatttttttaagacagagattacattggctaatggagagattagaaagagacctttgattgagacaaatggagagacaggagagattgtgtgggataagggaagagattttgctacagtgagaaaggtgttgagtatgcctcaggtgaatattgtgaagaagacagaggtgcagacaggaggatttagtaaggagagtattttgcctaagagaaatagtgataagttgattgctagaaagaaggattgggatcctaagaagtatggaggatttgatagtcctacagtggcttatagtgtgttggtggtggctaaggtggagaagggaaagagtaagaagttgaagagtgtgaaggagttgttgggaattacaattatggagagaagtagttttgagaagaatcctattgattttttggaggctaagggatataaggaggtgaagaaggatttgattattaagttgcctaagtatagtttgtttgagttggagaatggaagaaagagaatgttggctagtgctggagagttgcagaagggaaatgagttggctttgcctagtaagtatgtgaattttttgtatttggctagtcattatgagaagttgaagggaagtcctgaggataatgagcagaagcagttgtttgtggagcagcataagcattatttggatgagattattgagcagattagtgagtttagtaagagagtgattttggctgatgctaatttggataaggtgttgagtgcttataataagcatagagataagcctattagagagcaggctgagaatattattcatttgtttacattgacaaatttgggagctcctgctgcttttaagtattttgatacaacaattgatagaaagagatatacaagtacaaaggaggtgttggatgctacattgattcatcagagtattacaggattgtatgagacaagaattgatttgagtcagttgggaggagatggaggaggaagtcctaagaagaagagaaaggtgtga

SEQ ID NO: 311 - DNA, 4140 bp, Artificial Sequence
  Synthetic: Cas9 ORF using low A codons of Table 4, with start and stop codons
atggacaagaagtactccatcggcctggacatcggcaccaactccgtgggctgggccgtgatcaccgacgagtacaaggtgccctccaagaagttcaaggtgctgggcaacaccgaccggcactccatcaagaagaacctgatcggcgccctgctgttcgactccggcgagaccgccgaggccacccggctgaagcggaccgcccggcggcggtacacccggcggaagaaccggatctgctacctgcaggagatcttctccaacgagatggccaaggtggacgactccttcttccaccggctggaggagtccttcctggtggaggaggacaagaagcacgagcggcaccccatcttcggcaacatcgtggacgaggtggcctaccacgagaagtaccccaccatctaccacctgcggaagaagctggtggactccaccgacaaggccgacctgcggctgatctacctggccctggcccacatgatcaagttccggggccacttcctgatcgagggcgacctgaaccccgacaactccgacgtggacaagctgttcatccagctggtgcagacctacaaccagctgttcgaggagaaccccatcaacgcctccggcgtggacgccaaggccatcctgtccgcccggctgtccaagtcccggcggctggagaacctgatcgcccagctgcccggcgagaagaagaacggcctgttcggcaacctgatcgccctgtccctgggcctgacccccaacttcaagtccaacttcgacctggccgaggacgccaagctgcagctgtccaaggacacctacgacgacgacctggacaacctgctggcccagatcggcgaccagtacgccgacctgttcctggccgccaagaacctgtccgacgccatcctgctgtccgacatcctgcgggtgaacaccgagatcaccaaggcccccctgtccgcctccatgatcaagcggtacgacgagcaccaccaggacctgaccctgctgaaggccctggtgcggcagcagctgcccgagaagtacaaggagatcttcttcgaccagtccaagaacggctacgccggctacatcgacggcggcgcctcccaggaggagttctacaagttcatcaagcccatcctggagaagatggacggcaccgaggagctgctggtgaagctgaaccgggaggacctgctgcggaagcagcggaccttcgacaacggctccatcccccaccagatccacctgggcgagctgcacgccatcctgcggcggcaggaggacttctaccccttcctgaaggacaaccgggagaagatcgagaagatcctgaccttccggatcccctactacgtgggccccctggcccggggcaactcccggttcgcctggatgacccggaagtccgaggagaccatcaccccctggaacttcgaggaggtggtggacaagggcgcctccgcccagtccttcatcgagcggatgaccaacttcgacaagaacctgcccaacgagaaggtgctgcccaagcactccctgctgtacgagtacttcaccgtgtacaacgagctgaccaaggtgaagtacgtgaccgagggcatgcggaagcccgccttcctgtccggcgagcagaagaaggccatcgtggacctgctgttcaagaccaaccggaaggtgaccgtgaagcagctgaaggaggactacttcaagaagatcgagtgcttcgactccgtggagatctccggcgtggaggaccggttcaacgcctccctgggcacctaccacgacctgctgaagatcatcaaggacaaggacttcctggacaacgaggagaacgaggacatcctggaggacatcgtgctgaccctgaccctgttcgaggaccgggagatgatcgaggagcggctgaagacctacgcccacctgttcgacgacaaggtgatgaagcagctgaagcggcggcggtacaccggctggggccggctgtcccggaagctgatcaacggcatccgggacaagcagtccggcaagaccatcctggacttcctgaagtccgacggcttcgccaaccggaacttcatgcagctgatccacgacgactccctgaccttcaaggaggacatccagaaggcccaggtgtccggccagggcgactccctgcacgagcacatcgccaacctggccggctcccccgccatcaagaagggcatcctgcagaccgtgaaggtggtggacgagctggtgaaggtgatgggccggcacaagcccgagaacatcgtgatcgagatggcccgggagaaccagaccacccagaagggccagaagaactcccgggagcggatgaagcggatcgaggagggcatcaaggagctgggctcccagatcctgaaggagcaccccgtggagaacacccagctgcagaacgagaagctgtacctgtactacctgcagaacggccgggacatgtacgtggaccaggagctggacatcaaccggctgtccgactacgacgtggaccacatcgtgccccagtccttcctgaaggacgactccatcgacaacaaggtgctgacccggtccgacaagaaccggggcaagtccgacaacgtgccctccgaggaggtggtgaagaagatgaagaactactggcggcagctgctgaacgccaagctgatcacccagcggaagttcgacaacctgaccaaggccgagcggggcggcctgtccgagctggacaaggccggcttcatcaagcggcagctggtggagacccggcagatcaccaagcacgtggcccagatcctggactcccggatgaacaccaagtacgacgagaacgacaagctgatccgggaggtgaaggtgatcaccctgaagtccaagctggtgtccgacttccggaaggacttccagttctacaaggtgcgggagatcaacaactaccaccacgcccacgacgcctacctgaacgccgtggtgggcaccgccctgatcaagaagtaccccaagctggagtccgagttcgtgtacggcgactacaaggtgtacgacgtgcggaagatgatcgccaagtccgagcaggagatcggcaaggccaccgccaagtacttcttctactccaacatcatgaacttcttcaagaccgagatcaccctggccaacggcgagatccggaagcggcccctgatcgagaccaacggcgagaccggcgagatcgtgtgggacaagggccgggacttcgccaccgtgcggaaggtgctgtccatgccccaggtgaacatcgtgaagaagaccgaggtgcagaccggcggcttctccaaggagtccatcctgcccaagcggaactccgacaagctgatcgcccggaagaaggactgggaccccaagaagtacggcggcttcgactcccccaccgtggcctactccgtgctggtggtggccaaggtggagaagggcaagtccaagaagctgaagtccgtgaaggagctgctgggcatcaccatcatggagcggtcctccttcgagaagaaccccatcgacttcctggaggccaagggctacaaggaggtgaagaaggacctgatcatcaagctgcccaagtactccctgttcgagctggagaacggccggaagcggatgctggcctccgccggcgagctgcagaagggcaacgagctggccctgccctccaagtacgtgaacttcctgtacctggcctcccactacgagaagctgaagggctcccccgaggacaacgagcagaagcagctgttcgtggagcagcacaagcactacctggacgagatcatcgagcagatctccgagttctccaagcgggtgatcctggccgacgccaacctggacaaggtgctgtccgcctacaacaagcaccgggacaagcccatccgggagcaggccgagaacatcatccacctgttcaccctgaccaacctgggcgcccccgccgccttcaagtacttcgacaccaccatcgaccggaagcggtacacctccaccaaggaggtgctggacgccaccctgatccaccagtccatcaccggcctgtacgagacccggatcgacctgtcccagctgggcggcgacggcggcggctcccccaagaagaagcggaaggtgtga

SEQ ID NO: 312 - DNA, 4140 bp, Artificial Sequence
  Synthetic: Cas9 ORF using low A/U codons of Table 4, with start and stop codons
atggacaagaagtacagcatcggcctggacatcggcaccaacagcgtgggctgggccgtgatcaccgacgagtacaaggtgcccagcaagaagttcaaggtgctgggcaacaccgaccggcacagcatcaagaagaacctgatcggcgccctgctgttcgacagcggcgagaccgccgaggccacccggctgaagcggaccgcccggcggcggtacacccggcggaagaaccggatctgctacctgcaggagatcttcagcaacgagatggccaaggtggacgacagcttcttccaccggctggaggagagcttcctggtggaggaggacaagaagcacgagcggcaccccatcttcggcaacatcgtggacgaggtggcctaccacgagaagtaccccaccatctaccacctgcggaagaagctggtggacagcaccgacaaggccgacctgcggctgatctacctggccctggcccacatgatcaagttccggggccacttcctgatcgagggcgacctgaaccccgacaacagcgacgtggacaagctgttcatccagctggtgcagacctacaaccagctgttcgaggagaaccccatcaacgccagcggcgtggacgccaaggccatcctgagcgcccggctgagcaagagccggcggctggagaacctgatcgcccagctgcccggcgagaagaagaacggcctgttcggcaacctgatcgccctgagcctgggcctgacccccaacttcaagagcaacttcgacctggccgaggacgccaagctgcagctgagcaaggacacctacgacgacgacctggacaacctgctggcccagatcggcgaccagtacgccgacctgttcctggccgccaagaacctgagcgacgccatcctgctgagcgacatcctgcgggtgaacaccgagatcaccaaggcccccctgagcgccagcatgatcaagcggtacgacgagcaccaccaggacctgaccctgctgaaggccctggtgcggcagcagctgcccgagaagtacaaggagatcttcttcgaccagagcaagaacggctacgccggctacatcgacggcggcgccagccaggaggagttctacaagttcatcaagcccatcctggagaagatggacggcaccgaggagctgctggtgaagctgaaccgggaggacctgctgcggaagcagcggaccttcgacaacggcagcatcccccaccagatccacctgggcgagctgcacgccatcctgcggcggcaggaggacttctaccccttcctgaaggacaaccgggagaagatcgagaagatcctgaccttccggatcccctactacgtgggccccctggcccggggcaacagccggttcgcctggatgacccggaagagcgaggagaccatcaccccctggaacttcgaggaggtggtggacaagggcgccagcgcccagagcttcatcgagcggatgaccaacttcgacaagaacctgcccaacgagaaggtgctgcccaagcacagcctgctgtacgagtacttcaccgtgtacaacgagctgaccaaggtgaagtacgtgaccgagggcatgcggaagcccgccttcctgagcggcgagcagaagaaggccatcgtggacctgctgttcaagaccaaccggaaggtgaccgtgaagcagctgaaggaggactacttcaagaagatcgagtgcttcgacagcgtggagatcagcggcgtggaggaccggttcaacgccagcctgggcacctaccacgacctgctgaagatcatcaaggacaaggacttcctggacaacgaggagaacgaggacatcctggaggacatcgtgctgaccctgaccctgttcgaggaccgggagatgatcgaggagcggctgaagacctacgcccacctgttcgacgacaaggtgatgaagcagctgaagcggcggcggtacaccggctggggccggctgagccggaagctgatcaacggcatccgggacaagcagagcggcaagaccatcctggacttcctgaagagcgacggcttcgccaaccggaacttcatgcagctgatccacgacgacagcctgaccttcaaggaggacatccagaaggcccaggtgagcggccagggcgacagcctgcacgagcacatcgccaacctggccggcagccccgccatcaagaagggcatcctgcagaccgtgaaggtggtggacgagctggtgaaggtgatgggccggcacaagcccgagaacatcgtgatcgagatggcccgggagaaccagaccacccagaagggccagaagaacagccgggagcggatgaagcggatcgaggagggcatcaaggagctgggcagccagatcctgaaggagcaccccgtggagaacacccagctgcagaacgagaagctgtacctgtactacctgcagaacggccgggacatgtacgtggaccaggagctggacatcaaccggctgagcgactacgacgtggaccacatcgtgccccagagcttcctgaaggacgacagcatcgacaacaaggtgctgacccggagcgacaagaaccggggcaagagcgacaacgtgcccagcgaggaggtggtgaagaagatgaagaactactggcggcagctgctgaacgccaagctgatcacccagcggaagttcgacaacctgaccaaggccgagcggggcggcctgagcgagctggacaaggccggcttcatcaagcggcagctggtggagacccggcagatcaccaagcacgtggcccagatcctggacagccggatgaacaccaagtacgacgagaacgacaagctgatccgggaggtgaaggtgatcaccctgaagagcaagctggtgagcgacttccggaaggacttccagttctacaaggtgcgggagatcaacaactaccaccacgcccacgacgcctacctgaacgccgtggtgggcaccgccctgatcaagaagtaccccaagctggagagcgagttcgtgtacggcgactacaaggtgtacgacgtgcggaagatgatcgccaagagcgagcaggagatcggcaaggccaccgccaagtacttcttctacagcaacatcatgaacttcttcaagaccgagatcaccctggccaacggcgagatccggaagcggcccctgatcgagaccaacggcgagaccggcgagatcgtgtgggacaagggccgggacttcgccaccgtgcggaaggtgctgagcatgccccaggtgaacatcgtgaagaagaccgaggtgcagaccggcggcttcagcaaggagagcatcctgcccaagcggaacagcgacaagctgatcgcccggaagaaggactgggaccccaagaagtacggcggcttcgacagccccaccgtggcctacagcgtgctggtggtggccaaggtggagaagggcaagagcaagaagctgaagagcgtgaaggagctgctgggcatcaccatcatggagcggagcagcttcgagaagaaccccatcgacttcctggaggccaagggctacaaggaggtgaagaaggacctgatcatcaagctgcccaagtacagcctgttcgagctggagaacggccggaagcggatgctggccagcgccggcgagctgcagaagggcaacgagctggccctgcccagcaagtacgtgaacttcctgtacctggccagccactacgagaagctgaagggcagccccgaggacaacgagcagaagcagctgttcgtggagcagcacaagcactacctggacgagatcatcgagcagatcagcgagttcagcaagcgggtgatcctggccgacgccaacctggacaaggtgctgagcgcctacaacaagcaccgggacaagcccatccgggagcaggccgagaacatcatccacctgttcaccctgaccaacctgggcgcccccgccgccttcaagtacttcgacaccaccatcgaccggaagcggtacaccagcaccaaggaggtgctggacgccaccctgatccaccagagcatcaccggcctgtacgagacccggatcgacctgagccagctgggcggcgacggcggcggcagccccaagaagaagcggaaggtgtga

SEQ ID NO: 313 - DNA, 4179 bp, Artificial Sequence
  Synthetic: Cas9 ORF using low A codons of Table 4, with two C-terminal NLS sequences and start and stop codons
atggacaagaagtactccatcggcctggacatcggcaccaactccgtgggctgggccgtgatcaccgacgagtacaaggtgccctccaagaagttcaaggtgctgggcaacaccgaccggcactccatcaagaagaacctgatcggcgccctgctgttcgactccggcgagaccgccgaggccacccggctgaagcggaccgcccggcggcggtacacccggcggaagaaccggatctgctacctgcaggagatcttctccaacgagatggccaaggtggacgactccttcttccaccggctggaggagtccttcctggtggaggaggacaagaagcacgagcggcaccccatcttcggcaacatcgtggacgaggtggcctaccacgagaagtaccccaccatctaccacctgcggaagaagctggtggactccaccgacaaggccgacctgcggctgatctacctggccctggcccacatgatcaagttccggggccacttcctgatcgagggcgacctgaaccccgacaactccgacgtggacaagctgttcatccagctggtgcagacctacaaccagctgttcgaggagaaccccatcaacgcctccggcgtggacgccaaggccatcctgtccgcccggctgtccaagtcccggcggctggagaacctgatcgcccagctgcccggcgagaagaagaacggcctgttcggcaacctgatcgccctgtccctgggcctgacccccaacttcaagtccaacttcgacctggccgaggacgccaagctgcagctgtccaaggacacctacgacgacgacctggacaacctgctggcccagatcggcgaccagtacgccgacctgttcctggccgccaagaacctgtccgacgccatcctgctgtccgacatcctgcgggtgaacaccgagatcaccaaggcccccctgtccgcctccatgatcaagcggtacgacgagcaccaccaggacctgaccctgctgaaggccctggtgcggcagcagctgcccgagaagtacaaggagatcttcttcgaccagtccaagaacggctacgccggctacatcgacggcggcgcctcccaggaggagttctacaagttcatcaagcccatcctggagaagatggacggcaccgaggagctgctggtgaagctgaaccgggaggacctgctgcggaagcagcggaccttcgacaacggctccatcccccaccagatccacctgggcgagctgcacgccatcctgcggcggcaggaggacttctaccccttcctgaaggacaaccgggagaagatcgagaagatcctgaccttccggatcccctactacgtgggccccctggcccggggcaactcccggttcgcctggatgacccggaagtccgaggagaccatcaccccctggaacttcgaggaggtggtggacaagggcgcctccgcccagtccttcatcgagcggatgaccaacttcgacaagaacctgcccaacgagaaggtgctgcccaagcactccctgctgtacgagtacttcaccgtgtacaacgagctgaccaaggtgaagtacgtgaccgagggcatgcggaagcccgccttcctgtccggcgagcagaagaaggccatcgtggacctgctgttcaagaccaaccggaaggtgaccgtgaagcagctgaaggaggactacttcaagaagatcgagtgcttcgactccgtggagatctccggcgtggaggaccggttcaacgcctccctgggcacctaccacgacctgctgaagatcatcaaggacaaggacttcctggacaacgaggagaacgaggacatcctggaggacatcgtgctgaccctgaccctgttcgaggaccgggagatgatcgaggagcggctgaagacctacgcccacctgttcgacgacaaggtgatgaagcagctgaagcggcggcggtacaccggctggggccggctgtcccggaagctgatcaacggcatccgggacaagcagtccggcaagaccatcctggacttcctgaagtccgacggcttcgccaaccggaacttcatgcagctgatccacgacgactccctgaccttcaaggaggacatccagaaggcccaggtgtccggccagggcgactccctgcacgagcacatcgccaacctggccggctcccccgccatcaagaagggcatcctgcagaccgtgaaggtggtggacgagctggtgaaggtgatgggccggcacaagcccgagaacatcgtgatcgagatggcccgggagaaccagaccacccagaagggccagaagaactcccgggagcggatgaagcggatcgaggagggcatcaaggagctgggctcccagatcctgaaggagcaccccgtggagaacacccagctgcagaacgagaagctgtacctgtactacctgcagaacggccgggacatgtacgtggaccaggagctggacatcaaccggctgtccgactacgacgtggaccacatcgtgccccagtccttcctgaaggacgactccatcgacaacaaggtgctgacccggtccgacaagaaccggggcaagtccgacaacgtgccctccgaggaggtggtgaagaagatgaagaactactggcggcagctgctgaacgccaagctgatcacccagcggaagttcgacaacctgaccaaggccgagcggggcggcctgtccgagctggacaaggccggcttcatcaagcggcagctggtggagacccggcagatcaccaagcacgtggcccagatcctggactcccggatgaacaccaagtacgacgagaacgacaagctgatccgggaggtgaaggtgatcaccctgaagtccaagctggtgtccgacttccggaaggacttccagttctacaaggtgcgggagatcaacaactaccaccacgcccacgacgcctacctgaacgccgtggtgggcaccgccctgatcaagaagtaccccaagctggagtccgagttcgtgtacggcgactacaaggtgtacgacgtgcggaagatgatcgccaagtccgagcaggagatcggcaaggccaccgccaagtacttcttctactccaacatcatgaacttcttcaagaccgagatcaccctggccaacggcgagatccggaagcggcccctgatcgagaccaacggcgagaccggcgagatcgtgtgggacaagggccgggacttcgccaccgtgcggaaggtgctgtccatgccccaggtgaacatcgtgaagaagaccgaggtgcagaccggcggcttctccaaggagtccatcctgcccaagcggaactccgacaagctgatcgcccggaagaaggactgggaccccaagaagtacggcggcttcgactcccccaccgtggcctactccgtgctggtggtggccaaggtggagaagggcaagtccaagaagctgaagtccgtgaaggagctgctgggcatcaccatcatggagcggtcctccttcgagaagaaccccatcgacttcctggaggccaagggctacaaggaggtgaagaaggacctgatcatcaagctgcccaagtactccctgttcgagctggagaacggccggaagcggatgctggcctccgccggcgagctgcagaagggcaacgagctggccctgccctccaagtacgtgaacttcctgtacctggcctcccactacgagaagctgaagggctcccccgaggacaacgagcagaagcagctgttcgtggagcagcacaagcactacctggacgagatcatcgagcagatctccgagttctccaagcgggtgatcctggccgacgccaacctggacaaggtgctgtccgcctacaacaagcaccgggacaagcccatccgggagcaggccgagaacatcatccacctgttcaccctgaccaacctgggcgcccccgccgccttcaagtacttcgacaccaccatcgaccggaagcggtacacctccaccaaggaggtgctggacgccaccctgatccaccagtccatcaccggcctgtacgagacccggatcgacctgtcccagctgggcggcgacggctccggctcccccaagaagaagcggaaggtggacggctcccccaagaagaagcggaaggtggactccggctga

SEQ ID NO: 314 - DNA, 4140 bp, Artificial Sequence
  Synthetic: Cas9 nickase ORF using low A codons of Table 4, with start and stop codons
atggacaagaagtactccatcggcctggccatcggcaccaactccgtgggctgggccgtgatcaccgacgagtacaaggtgccctccaagaagttcaaggtgctgggcaacaccgaccggcactccatcaagaagaacctgatcggcgccctgctgttcgactccggcgagaccgccgaggccacccggctgaagcggaccgcccggcggcggtacacccggcggaagaaccggatctgctacctgcaggagatcttctccaacgagatggccaaggtggacgactccttcttccaccggctggaggagtccttcctggtggaggaggacaagaagcacgagcggcaccccatcttcggcaacatcgtggacgaggtggcctaccacgagaagtaccccaccatctaccacctgcggaagaagctggtggactccaccgacaaggccgacctgcggctgatctacctggccctggcccacatgatcaagttccggggccacttcctgatcgagggcgacctgaaccccgacaactccgacgtggacaagctgttcatccagctggtgcagacctacaaccagctgttcgaggagaaccccatcaacgcctccggcgtggacgccaaggccatcctgtccgcccggctgtccaagtcccggcggctggagaacctgatcgcccagctgcccggcgagaagaagaacggcctgttcggcaacctgatcgccctgtccctgggcctgacccccaacttcaagtccaacttcgacctggccgaggacgccaagctgcagctgtccaaggacacctacgacgacgacctggacaacctgctggcccagatcggcgaccagtacgccgacctgttcctggccgccaagaacctgtccgacgccatcctgctgtccgacatcctgcgggtgaacaccgagatcaccaaggcccccctgtccgcctccatgatcaagcggtacgacgagcaccaccaggacctgaccctgctgaaggccctggtgcggcagcagctgcccgagaagtacaaggagatcttcttcgaccagtccaagaacggctacgccggctacatcgacggcggcgcctcccaggaggagttctacaagttcatcaagcccatcctggagaagatggacggcaccgaggagctgctggtgaagctgaaccgggaggacctgctgcggaagcagcggaccttcgacaacggctccatcccccaccagatccacctgggcgagctgcacgccatcctgcggcggcaggaggacttctaccccttcctgaaggacaaccgggagaagatcgagaagatcctgaccttccggatcccctactacgtgggccccctggcccggggcaactcccggttcgcctggatgacccggaagtccgaggagaccatcaccccctggaacttcgaggaggtggtggacaagggcgcctccgcccagtccttcatcgagcggatgaccaacttcgacaagaacctgcccaacgagaaggtgctgcccaagcactccctgctgtacgagtacttcaccgtgtacaacgagctgaccaaggtgaagtacgtgaccgagggcatgcggaagcccgccttcctgtccggcgagcagaagaaggccatcgtggacctgctgttcaagaccaaccggaaggtgaccgtgaagcagctgaaggaggactacttcaagaagatcgagtgcttcgactccgtggagatctccggcgtggaggaccggttcaacgcctccctgggcacctaccacgacctgctgaagatcatcaaggacaaggacttcctggacaacgaggagaacgaggacatcctggaggacatcgtgctgaccctgaccctgttcgaggaccgggagatgatcgaggagcggctgaagacctacgcccacctgttcgacgacaaggtgatgaagcagctgaagcggcggcggtacaccggctggggccggctgtcccggaagctgatcaacggcatccgggacaagcagtccggcaagaccatcctggacttcctgaagtccgacggcttcgccaaccggaacttcatgcagctgatccacgacgactccctgaccttcaaggaggacatccagaaggcccaggtgtccggccagggcgactccctgcacgagcacatcgccaacctggccggctcccccgccatcaagaagggcatcctgcagaccgtgaaggtggtggacgagctggtgaaggtgatgggccggcacaagcccgagaacatcgtgatcgagatggcccgggagaaccagaccacccagaagggccagaagaactcccgggagcggatgaagcggatcgaggagggcatcaaggagctgggctcccagatcctgaaggagcaccccgtggagaacacccagctgcagaacgagaagctgtacctgtactacctgcagaacggccgggacatgtacgtggaccaggagctggacatcaaccggctgtccgactacgacgtggaccacatcgtgccccagtccttcctgaaggacgactccatcgacaacaaggtgctgacccggtccgacaagaaccggggcaagtccgacaacgtgccctccgaggaggtggtgaagaagatgaagaactactggcggcagctgctgaacgccaagctgatcacccagcggaagttcgacaacctgaccaaggccgagcggggcggcctgtccgagctggacaaggccggcttcatcaagcggcagctggtggagacccggcagatcaccaagcacgtggcccagatcctggactcccggatgaacaccaagtacgacgagaacgacaagctgatccgggaggtgaaggtgatcaccctgaagtccaagctggtgtccgacttccggaaggacttccagttctacaaggtgcgggagatcaacaactaccaccacgcccacgacgcctacctgaacgccgtggtgggcaccgccctgatcaagaagtaccccaagctggagtccgagttcgtgtacggcgactacaaggtgtacgacgtgcggaagatgatcgccaagtccgagcaggagatcggcaaggccaccgccaagtacttcttctactccaacatcatgaacttcttcaagaccgagatcaccctggccaacggcgagatccggaagcggcccctgatcgagaccaacggcgagaccggcgagatcgtgtgggacaagggccgggacttcgccaccgtgcggaaggtgctgtccatgccccaggtgaacatcgtgaagaagaccgaggtgcagaccggcggcttctccaaggagtccatcctgcccaagcggaactccgacaagctgatcgcccggaagaaggactgggaccccaagaagtacggcggcttcgactcccccaccgtggcctactccgtgctggtggtggccaaggtggagaagggcaagtccaagaagctgaagtccgtgaaggagctgctgggcatcaccatcatggagcggtcctccttcgagaagaaccccatcgacttcctggaggccaagggctacaaggaggtgaagaaggacctgatcatcaagctgcccaagtactccctgttcgagctggagaacggccggaagcggatgctggcctccgccggcgagctgcagaagggcaacgagctggccctgccctccaagtacgtgaacttcctgtacctggcctcccactacgagaagctgaagggctcccccgaggacaacgagcagaagcagctgttcgtggagcagcacaagcactacctggacgagatcatcgagcagatctccgagttctccaagcgggtgatcctggccgacgccaacctggacaaggtgctgtccgcctacaacaagcaccgggacaagcccatccgggagcaggccgagaacatcatccacctgttcaccctgaccaacctgggcgcccccgccgccttcaagtacttcgacaccaccatcgaccggaagcggtacacctccaccaaggaggtgctggacgccaccctgatccaccagtccatcaccggcctgtacgagacccggatcgacctgtcccagctgggcggcgacggcggcggctcccccaagaagaagcggaaggtgtga

SEQ ID NO: 315 - DNA, 4107 bp, Artificial Sequence
  Synthetic: Cas9 nickase ORF using low A codons of Table 4, with start and stop codons and no NLS
atggacaagaagtactccatcggcctggccatcggcaccaactccgtgggctgggccgtgatcaccgacgagtacaaggtgccctccaagaagttcaaggtgctgggcaacaccgaccggcactccatcaagaagaacctgatcggcgccctgctgttcgactccggcgagaccgccgaggccacccggctgaagcggaccgcccggcggcggtacacccggcggaagaaccggatctgctacctgcaggagatcttctccaacgagatggccaaggtggacgactccttcttccaccggctggaggagtccttcctggtggaggaggacaagaagcacgagcggcaccccatcttcggcaacatcgtggacgaggtggcctaccacgagaagtaccccaccatctaccacctgcggaagaagctggtggactccaccgacaaggccgacctgcggctgatctacctggccctggcccacatgatcaagttccggggccacttcctgatcgagggcgacctgaaccccgacaactccgacgtggacaagctgttcatccagctggtgcagacctacaaccagctgttcgaggagaaccccatcaacgcctccggcgtggacgccaaggccatcctgtccgcccggctgtccaagtcccggcggctggagaacctgatcgcccagctgcccggcgagaagaagaacggcctgttcggcaacctgatcgccctgtccctgggcctgacccccaacttcaagtccaacttcgacctggccgaggacgccaagctgcagctgtccaaggacacctacgacgacgacctggacaacctgctggcccagatcggcgaccagtacgccgacctgttcctggccgccaagaacctgtccgacgccatcctgctgtccgacatcctgcgggtgaacaccgagatcaccaaggcccccctgtccgcctccatgatcaagcggtacgacgagcaccaccaggacctgaccctgctgaaggccctggtgcggcagcagctgcccgagaagtacaaggagatcttcttcgaccagtccaagaacggctacgccggctacatcgacggcggcgcctcccaggaggagttctacaagttcatcaagcccatcctggagaagatggacggcaccgaggagctgctggtgaagctgaaccgggaggacctgctgcggaagcagcggaccttcgacaacggctccatcccccaccagatccacctgggcgagctgcacgccatcctgcggcggcaggaggacttctaccccttcctgaaggacaaccgggagaagatcgagaagatcctgaccttccggatcccctactacgtgggccccctggcccggggcaactcccggttcgcctggatgacccggaagtccgaggagaccatcaccccctggaacttcgaggaggtggtggacaagggcgcctccgcccagtccttcatcgagcggatgaccaacttcgacaagaacctgcccaacgagaaggtgctgcccaagcactccctgctgtacgagtacttcaccgtgtacaacgagctgaccaaggtgaagtacgtgaccgagggcatgcggaagcccgccttcctgtccggcgagcagaagaaggccatcgtggacctgctgttcaagaccaaccggaaggtgaccgtgaagcagctgaaggaggactacttcaagaagatcgagtgcttcgactccgtggagatctccggcgtggaggaccggttcaacgcctccctgggcacctaccacgacctgctgaagatcatcaaggacaaggacttcctggacaacgaggagaacgaggacatcctggaggacatcgtgctgaccctgaccctgttcgaggaccgggagatgatcgaggagcggctgaagacctacgcccacctgttcgacgacaaggtgatgaagcagctgaagcggcggcggtacaccggctggggccggctgtcccggaagctgatcaacggcatccgggacaagcagtccggcaagaccatcctggacttcctgaagtccgacggcttcgccaaccggaacttcatgcagctgatccacgacgactccctgaccttcaaggaggacatccagaaggcccaggtgtccggccagggcgactccctgcacgagcacatcgccaacctggccggctcccccgccatcaagaagggcatcctgcagaccgtgaaggtggtggacgagctggtgaaggtgatgggccggcacaagcccgagaacatcgtgatcgagatggcccgggagaaccagaccacccagaagggccagaagaactcccgggagcggatgaagcggatcgaggagggcatcaaggagctgggctcccagatcctgaaggagcaccccgtggagaacacccagctgcagaacgagaagctgtacctgtactacctgcagaacggccgggacatgtacgtggaccaggagctggacatcaaccggctgtccgactacgacgtggaccacatcgtgccccagtccttcctgaaggacgactccatcgacaacaaggtgctgacccggtccgacaagaaccggggcaagtccgacaacgtgccctccgaggaggtggtgaagaagatgaagaactactggcggcagctgctgaacgccaagctgatcacccagcggaagttcgacaacctgaccaaggccgagcggggcggcctgtccgagctggacaaggccggcttcatcaagcggcagctggtggagacccggcagatcaccaagcacgtggcccagatcctggactcccggatgaacaccaagtacgacgagaacgacaagctgatccgggaggtgaaggtgatcaccctgaagtccaagctggtgtccgacttccggaaggacttccagttctacaaggtgcgggagatcaacaactaccaccacgcccacgacgcctacctgaacgccgtggtgggcaccgccctgatcaagaagtaccccaagctggagtccgagttcgtgtacggcgactacaaggtgtacgacgtgcggaagatgatcgccaagtccgagcaggagatcggcaaggccaccgccaagtacttcttctactccaacatcatgaacttcttcaagaccgagatcaccctggccaacggcgagatccggaagcggcccctgatcgagaccaacggcgagaccggcgagatcgtgtgggacaagggccgggacttcgccaccgtgcggaaggtgctgtccatgccccaggtgaacatcgtgaagaagaccgaggtgcagaccggcggcttctccaaggagtccatcctgcccaagcggaactccgacaagctgatcgcccggaagaaggactgggaccccaagaagtacggcggcttcgactcccccaccgtggcctactccgtgctggtggtggccaaggtggagaagggcaagtccaagaagctgaagtccgtgaaggagctgctgggcatcaccatcatggagcggtcctccttcgagaagaaccccatcgacttcctggaggccaagggctacaaggaggtgaagaaggacctgatcatcaagctgcccaagtactccctgttcgagctggagaacggccggaagcggatgctggcctccgccggcgagctgcagaagggcaacgagctggccctgccctccaagtacgtgaacttcctgtacctggcctcccactacgagaagctgaagggctcccccgaggacaacgagcagaagcagctgttcgtggagcagcacaagcactacctggacgagatcatcgagcagatctccgagttctccaagcgggtgatcctggccgacgccaacctggacaaggtgctgtccgcctacaacaagcaccgggacaagcccatccgggagcaggccgagaacatcatccacctgttcaccctgaccaacctgggcgcccccgccgccttcaagtacttcgacaccaccatcgaccggaagcggtacacctccaccaaggaggtgctggacgccaccctgatccaccagtccatcaccggcctgtacgagacccggatcgacctgtcccagctgggcggcgactga

SEQ ID NO: 316 - DNA, 4179 bp, Artificial Sequence
  Synthetic: Cas9 nickase ORF using low A codons of Table 4, with two C-terminal NLS sequences and start and stop codons
atggacaagaagtactccatcggcctggccatcggcaccaactccgtgggctgggccgtgatcaccgacgagtacaaggtgccctccaagaagttcaaggtgctgggcaacaccgaccggcactccatcaagaagaacctgatcggcgccctgctgttcgactccggcgagaccgccgaggccacccggctgaagcggaccgcccggcggcggtacacccggcggaagaaccggatctgctacctgcaggagatcttctccaacgagatggccaaggtggacgactccttcttccaccggctggaggagtccttcctggtggaggaggacaagaagcacgagcggcaccccatcttcggcaacatcgtggacgaggtggcctaccacgagaagtaccccaccatctaccacctgcggaagaagctggtggactccaccgacaaggccgacctgcggctgatctacctggccctggcccacatgatcaagttccggggccacttcctgatcgagggcgacctgaaccccgacaactccgacgtggacaagctgttcatccagctggtgcagacctacaaccagctgttcgaggagaaccccatcaacgcctccggcgtggacgccaaggccatcctgtccgcccggctgtccaagtcccggcggctggagaacctgatcgcccagctgcccggcgagaagaagaacggcctgttcggcaacctgatcgccctgtccctgggcctgacccccaacttcaagtccaacttcgacctggccgaggacgccaagctgcagctgtccaaggacacctacgacgacgacctggacaacctgctggcccagatcggcgaccagtacgccgacctgttcctggccgccaagaacctgtccgacgccatcctgctgtccgacatcctgcgggtgaacaccgagatcaccaaggcccccctgtccgcctccatgatcaagcggtacgacgagcaccaccaggacctgaccctgctgaaggccctggtgcggcagcagctgcccgagaagtacaaggagatcttcttcgaccagtccaagaacggctacgccggctacatcgacggcggcgcctcccaggaggagttctacaagttcatcaagcccatcctggagaagatggacggcaccgaggagctgctggtgaagctgaaccgggaggacctgctgcggaagcagcggaccttcgacaacggctccatcccccaccagatccacctgggcgagctgcacgccatcctgcggcggcaggaggacttctaccccttcctgaaggacaaccgggagaagatcgagaagatcctgaccttccggatcccctactacgtgggccccctggcccggggcaactcccggttcgcctggatgacccggaagtccgaggagaccatcaccccctggaacttcgaggaggtggtggacaagggcgcctccgcccagtccttcatcgagcggatgaccaacttcgacaagaacctgcccaacgagaaggtgctgcccaagcactccctgctgtacgagtacttcaccgtgtacaacgagctgaccaaggtgaagtacgtgaccgagggcatgcggaagcccgccttcctgtccggcgagcagaagaaggccatcgtggacctgctgttcaagaccaaccggaaggtgaccgtgaagcagctgaaggaggactacttcaagaagatcgagtgcttcgactccgtggagatctccggcgtggaggaccggttcaacgcctccctgggcacctaccacgacctgctgaagatcatcaaggacaaggacttcctggacaacgaggagaacgaggacatcctggaggacatcgtgctgaccctgaccctgttcgaggaccgggagatgatcgaggagcggctgaagacctacgcccacctgttcgacgacaaggtgatgaagcagctgaagcggcggcggtacaccggctggggccggctgtcccggaagctgatcaacggcatccgggacaagcagtccggcaagaccatcctggacttcctgaagtccgacggcttcgccaaccggaacttcatgcagctgatccacgacgactccctgaccttcaaggaggacatccagaaggcccaggtgtccggccagggcgactccctgcacgagcacatcgccaacctggccggctcccccgccatcaagaagggcatcctgcagaccgtgaaggtggtggacgagctggtgaaggtgatgggccggcacaagcccgagaacatcgtgatcgagatggcccgggagaaccagaccacccagaagggccagaagaactcccgggagcggatgaagcggatcgaggagggcatcaaggagctgggctcccagatcctgaaggagcaccccgtggagaacacccagctgcagaacgagaagctgtacctgtactacctgcagaacggccgggacatgtacgtggaccaggagctggacatcaaccggctgtccgactacgacgtggaccacatcgtgccccagtccttcctgaaggacgactccatcgacaacaaggtgctgacccggtccgacaagaaccggggcaagtccgacaacgtgccctccgaggaggtggtgaagaagatgaagaactactggcggcagctgctgaacgccaagctgatcacccagcggaagttcgacaacctgaccaaggccgagcggggcggcctgtccgagctggacaaggccggcttcatcaagcggcagctggtggagacccggcagatcaccaagcacgtggcccagatcctggactcccggatgaacaccaagtacgacgagaacgacaagctgatccgggaggtgaaggtgatcaccctgaagtccaagctggtgtccgacttccggaaggacttccagttctacaaggtgcgggagatcaacaactaccaccacgcccacgacgcctacctgaacgccgtggtgggcaccgccctgatcaagaagtaccccaagctggagtccgagttcgtgtacggcgactacaaggtgtacgacgtgcggaagatgatcgccaagtccgagcaggagatcggcaaggccaccgccaagtacttcttctactccaacatcatgaacttcttcaagaccgagatcaccctggccaacggcgagatccggaagcggcccctgatcgagaccaacggcgagaccggcgagatcgtgtgggacaagggccgggacttcgccaccgtgcggaaggtgctgtccatgccccaggtgaacatcgtgaagaagaccgaggtgcagaccggcggcttctccaaggagtccatcctgcccaagcggaactccgacaagctgatcgcccggaagaaggactgggaccccaagaagtacggcggcttcgactcccccaccgtggcctactccgtgctggtggtggccaaggtggagaagggcaagtccaagaagctgaagtccgtgaaggagctgctgggcatcaccatcatggagcggtcctccttcgagaagaaccccatcgacttcctggaggccaagggctacaaggaggtgaagaaggacctgatcatcaagctgcccaagtactccctgttcgagctggagaacggccggaagcggatgctggcctccgccggcgagctgcagaagggcaacgagctggccctgccctccaagtacgtgaacttcctgtacctggcctcccactacgagaagctgaagggctcccccgaggacaacgagcagaagcagctgttcgtggagcagcacaagcactacctggacgagatcatcgagcagatctccgagttctccaagcgggtgatcctggccgacgccaacctggacaaggtgctgtccgcctacaacaagcaccgggacaagcccatccgggagcaggccgagaacatcatccacctgttcaccctgaccaacctgggcgcccccgccgccttcaagtacttcgacaccaccatcgaccggaagcggtacacctccaccaaggaggtgctggacgccaccctgatccaccagtccatcaccggcctgtacgagacccggatcgacctgtcccagctgggcggcgacggctccggctcccccaagaagaagcggaaggtggacggctcccccaagaagaagcggaaggtggactccggctga

SEQ ID NO: 317 - DNA, 4140 bp, Artificial Sequence
  Synthetic: dCas9 ORF using low A codons of Table 4, with start and stop codons
atggacaagaagtactccatcggcctggccatcggcaccaactccgtgggctgggccgtgatcaccgacgagtacaaggtgccctccaagaagttcaaggtgctgggcaacaccgaccggcactccatcaagaagaacctgatcggcgccctgctgttcgactccggcgagaccgccgaggccacccggctgaagcggaccgcccggcggcggtacacccggcggaagaaccggatctgctacctgcaggagatcttctccaacgagatggccaaggtggacgactccttcttccaccggctggaggagtccttcctggtggaggaggacaagaagcacgagcggcaccccatcttcggcaacatcgtggacgaggtggcctaccacgagaagtaccccaccatctaccacctgcggaagaagctggtggactccaccgacaaggccgacctgcggctgatctacctggccctggcccacatgatcaagttccggggccacttcctgatcgagggcgacctgaaccccgacaactccgacgtggacaagctgttcatccagctggtgcagacctacaaccagctgttcgaggagaaccccatcaacgcctccggcgtggacgccaaggccatcctgtccgcccggctgtccaagtcccggcggctggagaacctgatcgcccagctgcccggcgagaagaagaacggcctgttcggcaacctgatcgccctgtccctgggcctgacccccaacttcaagtccaacttcgacctggccgaggacgccaagctgcagctgtccaaggacacctacgacgacgacctggacaacctgctggcccagatcggcgaccagtacgccgacctgttcctggccgccaagaacctgtccgacgccatcctgctgtccgacatcctgcgggtgaacaccgagatcaccaaggcccccctgtccgcctccatgatcaagcggtacgacgagcaccaccaggacctgaccctgctgaaggccctggtgcggcagcagctgcccgagaagtacaaggagatcttcttcgaccagtccaagaacggctacgccggctacatcgacggcggcgcctcccaggaggagttctacaagttcatcaagcccatcctggagaagatggacggcaccgaggagctgctggtgaagctgaaccgggaggacctgctgcggaagcagcggaccttcgacaacggctccatcccccaccagatccacctgggcgagctgcacgccatcctgcggcggcaggaggacttctaccccttcctgaaggacaaccgggagaagatcgagaagatcctgaccttccggatcccctactacgtgggccccctggcccggggcaactcccggttcgcctggatgacccggaagtccgaggagaccatcaccccctggaacttcgaggaggtggtggacaagggcgcctccgcccagtccttcatcgagcggatgaccaacttcgacaagaacctgcccaacgagaaggtgctgcccaagcactccctgctgtacgagtacttcaccgtgtacaacgagctgaccaaggtgaagtacgtgaccgagggcatgcggaagcccgccttcctgtccggcgagcagaagaaggccatcgtggacctgctgttcaagaccaaccggaaggtgaccgtgaagcagctgaaggaggactacttcaagaagatcgagtgcttcgactccgtggagatctccggcgtggaggaccggttcaacgcctccctgggcacctaccacgacctgctgaagatcatcaaggacaaggacttcctggacaacgaggagaacgaggacatcctggaggacatcgtgctgaccctgaccctgttcgaggaccgggagatgatcgaggagcggctgaagacctacgcccacctgttcgacgacaaggtgatgaagcagctgaagcggcggcggtacaccggctggggccggctgtcccggaagctgatcaacggcatccgggacaagcagtccggcaagaccatcctggacttcctgaagtccgacggcttcgccaaccggaacttcatgcagctgatccacgacgactccctgaccttcaaggaggacatccagaaggcccaggtgtccggccagggcgactccctgcacgagcacatcgccaacctggccggctcccccgccatcaagaagggcatcctgcagaccgtgaaggtggtggacgagctggtgaaggtgatgggccggcacaagcccgagaacatcgtgatcgagatggcccgggagaaccagaccacccagaagggccagaagaactcccgggagcggatgaagcggatcgaggagggcatcaaggagctgggctcccagatcctgaaggagcaccccgtggagaacacccagctgcagaacgagaagctgtacctgtactacctgcagaacggccgggacatgtacgtggaccaggagctggacatcaaccggctgtccgactacgacgtggacgccatcgtgccccagtccttcctgaaggacgactccatcgacaacaaggtgctgacccggtccgacaagaaccggggcaagtccgacaacgtgccctccgaggaggtggtgaagaagatgaagaactactggcggcagctgctgaacgccaagctgatcacccagcggaagttcgacaacctgaccaaggccgagcggggcggcctgtccgagctggacaaggccggcttcatcaagcggcagctggtggagacccggcagatcaccaagcacgtggcccagatcctggactcccggatgaacaccaagtacgacgagaacgacaagctgatccgggaggtgaaggtgatcaccctgaagtccaagctggtgtccgacttccggaaggacttccagttctacaaggtgcgggagatcaacaactaccaccacgcccacgacgcctacctgaacgccgtggtgggcaccgccctgatcaagaagtaccccaagctggagtccgagttcgtgtacggcgactacaaggtgtacgacgtgcggaagatgatcgccaagtccgagcaggagatcggcaaggccaccgccaagtacttcttctactccaacatcatgaacttcttcaagaccgagatcaccctggccaacggcgagatccggaagcggcccctgatcgagaccaacggcgagaccggcgagatcgtgtgggacaagggccgggacttcgccaccgtgcggaaggtgctgtccatgccccaggtgaacatcgtgaagaagaccgaggtgcagaccggcggcttctccaaggagtccatcctgcccaagcggaactccgacaagctgatcgcccggaagaaggactgggaccccaagaagtacggcggcttcgactcccccaccgtggcctactccgtgctggtggtggccaaggtggagaagggcaagtccaagaagctgaagtccgtgaaggagctgctgggcatcaccatcatggagcggtcctccttcgagaagaaccccatcgacttcctggaggccaagggctacaaggaggtgaagaaggacctgatcatcaagctgcccaagtactccctgttcgagctggagaacggccggaagcggatgctggcctccgccggcgagctgcagaagggcaacgagctggccctgccctccaagtacgtgaacttcctgtacctggcctcccactacgagaagctgaagggctcccccgaggacaacgagcagaagcagctgttcgtggagcagcacaagcactacctggacgagatcatcgagcagatctccgagttctccaagcgggtgatcctggccgacgccaacctggacaaggtgctgtccgcctacaacaagcaccgggacaagcccatccgggagcaggccgagaacatcatccacctgttcaccctgaccaacctgggcgcccccgccgccttcaagtacttcgacaccaccatcgaccggaagcggtacacctccaccaaggaggtgctggacgccaccctgatccaccagtccatcaccggcctgtacgagacccggatcgacctgtcccagctgggcggcgacggcggcggctcccccaagaagaagcggaaggtgtga

SEQ ID NO: 318 - DNA, 4107 bp, Artificial Sequence
  Synthetic: dCas9 ORF using low A codons of Table 4, with start and stop codons and no NLS
atggacaagaagtactccatcggcctggccatcggcaccaactccgtgggctgggccgtgatcaccgacgagtacaaggtgccctccaagaagttcaaggtgctgggcaacaccgaccggcactccatcaagaagaacctgatcggcgccctgctgttcgactccggcgagaccgccgaggccacccggctgaagcggaccgcccggcggcggtacacccggcggaagaaccggatctgctacctgcaggagatcttctccaacgagatggccaaggtggacgactccttcttccaccggctggaggagtccttcctggtggaggaggacaagaagcacgagcggcaccccatcttcggcaacatcgtggacgaggtggcctaccacgagaagtaccccaccatctaccacctgcggaagaagctggtggactccaccgacaaggccgacctgcggctgatctacctggccctggcccacatgatcaagttccggggccacttcctgatcgagggcgacctgaaccccgacaactccgacgtggacaagctgttcatccagctggtgcagacctacaaccagctgttcgaggagaaccccatcaacgcctccggcgtggacgccaaggccatcctgtccgcccggctgtccaagtcccggcggctggagaacctgatcgcccagctgcccggcgagaagaagaacggcctgttcggcaacctgatcgccctgtccctgggcctgacccccaacttcaagtccaacttcgacctggccgaggacgccaagctgcagctgtccaaggacacctacgacgacgacctggacaacctgctggcccagatcggcgaccagtacgccgacctgttcctggccgccaagaacctgtccgacgccatcctgctgtccgacatcctgcgggtgaacaccgagatcaccaaggcccccctgtccgcctccatgatcaagcggtacgacgagcaccaccaggacctgaccctgctgaaggccctggtgcggcagcagctgcccgagaagtacaaggagatcttcttcgaccagtccaagaacggctacgccggctacatcgacggcggcgcctcccaggaggagttctacaagttcatcaagcccatcctggagaagatggacggcaccgaggagctgctggtgaagctgaaccgggaggacctgctgcggaagcagcggaccttcgacaacggctccatcccccaccagatccacctgggcgagctgcacgccatcctgcggcggcaggaggacttctaccccttcctgaaggacaaccgggagaagatcgagaagatcctgaccttccggatcccctactacgtgggccccctggcccggggcaactcccggttcgcctggatgacccggaagtccgaggagaccatcaccccctggaacttcgaggaggtggtggacaagggcgcctccgcccagtccttcatcgagcggatgaccaacttcgacaagaacctgcccaacgagaaggtgctgcccaagcactccctgctgtacgagtacttcaccgtgtacaacgagctgaccaaggtgaagtacgtgaccgagggcatgcggaagcccgccttcctgtccggcgagcagaagaaggccatcgtggacctgctgttcaagaccaaccggaaggtgaccgtgaagcagctgaaggaggactacttcaagaagatcgagtgcttcgactccgtggagatctccggcgtggaggaccggttcaacgcctccctgggcacctaccacgacctgctgaagatcatcaaggacaaggacttcctggacaacgaggagaacgaggacatcctggaggacatcgtgctgaccctgaccctgttcgaggaccgggagatgatcgaggagcggctgaagacctacgcccacctgttcgacgacaaggtgatgaagcagctgaagcggcggcggtacaccggctggggccggctgtcccggaagctgatcaacggcatccgggacaagcagtccggcaagaccatcctggacttcctgaagtccgacggcttcgccaaccggaacttcatgcagctgatccacgacgactccctgaccttcaaggaggacatccagaaggcccaggtgtccggccagggcgactccctgcacgagcacatcgccaacctggccggctcccccgccatcaagaagggcatcctgcagaccgtgaaggtggtggacgagctggtgaaggtgatgggccggcacaagcccgagaacatcgtgatcgagatggcccgggagaaccagaccacccagaagggccagaagaactcccgggagcggatgaagcggatcgaggagggcatcaaggagctgggctcccagatcctgaaggagcaccccgtggagaacacccagctgcagaacgagaagctgtacctgtactacctgcagaacggccgggacatgtacgtggaccaggagctggacatcaaccggctgtccgactacgacgtggacgccatcgtgccccagtccttcctgaaggacgactccatcgacaacaaggtgctgacccggtccgacaagaaccggggcaagtccgacaacgtgccctccgaggaggtggtgaagaagatgaagaactactggcggcagctgctgaacgccaagctgatcacccagcggaagttcgacaacctgaccaaggccgagcggggcggcctgtccgagctggacaaggccggcttcatcaagcggcagctggtggagacccggcagatcaccaagcacgtggcccagatcctggactcccggatgaacaccaagtacgacgagaacgacaagctgatccgggaggtgaaggtgatcaccctgaagtccaagctggtgtccgacttccggaaggacttccagttctacaaggtgcgggagatcaacaactaccaccacgcccacgacgcctacctgaacgccgtggtgggcaccgccctgatcaagaagtaccccaagctggagtccgagttcgtgtacggcgactacaaggtgtacgacgtgcggaagatgatcgccaagtccgagcaggagatcggcaaggccaccgccaagtacttcttctactccaacatcatgaacttcttcaagaccgagatcaccctggccaacggcgagatccggaagcggcccctgatcgagaccaacggcgagaccggcgagatcgtgtgggacaagggccgggacttcgccaccgtgcggaaggtgctgtccatgccccaggtgaacatcgtgaagaagaccgaggtgcagaccggcggcttctccaaggagtccatcctgcccaagcggaactccgacaagctgatcgcccggaagaaggactgggaccccaagaagtacggcggcttcgactcccccaccgtggcctactccgtgctggtggtggccaaggtggagaagggcaagtccaagaagctgaagtccgtgaaggagctgctgggcatcaccatcatggagcggtcctccttcgagaagaaccccatcgacttcctggaggccaagggctacaaggaggtgaagaaggacctgatcatcaagctgcccaagtactccctgttcgagctggagaacggccggaagcggatgctggcctccgccggcgagctgcagaagggcaacgagctggccctgccctccaagtacgtgaacttcctgtacctggcctcccactacgagaagctgaagggctcccccgaggacaacgagcagaagcagctgttcgtggagcagcacaagcactacctggacgagatcatcgagcagatctccgagttctccaagcgggtgatcctggccgacgccaacctggacaaggtgctgtccgcctacaacaagcaccgggacaagcccatccgggagcaggccgagaacatcatccacctgttcaccctgaccaacctgggcgcccccgccgccttcaagtacttcgacaccaccatcgaccggaagcggtacacctccaccaaggaggtgctggacgccaccctgatccaccagtccatcaccggcctgtacgagacccggatcgacctgtcccagctgggcggcgactga

SEQ ID NO: 319 - DNA, 4179 bp, Artificial Sequence
  Synthetic: dCas9 ORF using low A codons of Table 4, with two C-terminal NLS sequences and start and stop codons
atggacaagaagtactccatcggcctggccatcggcaccaactccgtgggctgggccgtgatcaccgacgagtacaaggtgccctccaagaagttcaaggtgctgggcaacaccgaccggcactccatcaagaagaacctgatcggcgccctgctgttcgactccggcgagaccgccgaggccacccggctgaagcggaccgcccggcggcggtacacccggcggaagaaccggatctgctacctgcaggagatcttctccaacgagatggccaaggtggacgactccttcttccaccggctggaggagtccttcctggtggaggaggacaagaagcacgagcggcaccccatcttcggcaacatcgtggacgaggtggcctaccacgagaagtaccccaccatctaccacctgcggaagaagctggtggactccaccgacaaggccgacctgcggctgatctacctggccctggcccacatgatcaagttccggggccacttcctgatcgagggcgacctgaaccccgacaactccgacgtggacaagctgttcatccagctggtgcagacctacaaccagctgttcgaggagaaccccatcaacgcctccggcgtggacgccaaggccatcctgtccgcccggctgtccaagtcccggcggctggagaacctgatcgcccagctgcccggcgagaagaagaacggcctgttcggcaacctgatcgccctgtccctgggcctgacccccaacttcaagtccaacttcgacctggccgaggacgccaagctgcagctgtccaaggacacctacgacgacgacctggacaacctgctggcccagatcggcgaccagtacgccgacctgttcctggccgccaagaacctgtccgacgccatcctgctgtccgacatcctgcgggtgaacaccgagatcaccaaggcccccctgtccgcctccatgatcaagcggtacgacgagcaccaccaggacctgaccctgctgaaggccctggtgcggcagcagctgcccgagaagtacaaggagatcttcttcgaccagtccaagaacggctacgccggctacatcgacggcggcgcctcccaggaggagttctacaagttcatcaagcccatcctggagaagatggacggcaccgaggagctgctggtgaagctgaaccgggaggacctgctgcggaagcagcggaccttcgacaacggctccatcccccaccagatccacctgggcgagctgcacgccatcctgcggcggcaggaggacttctaccccttcctgaaggacaaccgggagaagatcgagaagatcctgaccttccggatcccctactacgtgggccccctggcccggggcaactcccggttcgcctggatgacccggaagtccgaggagaccatcaccccctggaacttcgaggaggtggtggacaagggcgcctccgcccagtccttcatcgagcggatgaccaacttcgacaagaacctgcccaacgagaaggtgctgcccaagcactccctgctgtacgagtacttcaccgtgtacaacgagctgaccaaggtgaagtacgtgaccgagggcatgcggaagcccgccttcctgtccggcgagcagaagaaggccatcgtggacctgctgttcaagaccaaccggaaggtgaccgtgaagcagctgaaggaggactacttcaagaagatcgagtgcttcgactccgtggagatctccggcgtggaggaccggttcaacgcctccctgggcacctaccacgacctgctgaagatcatcaaggacaaggacttcctggacaacgaggagaacgaggacatcctggaggacatcgtgctgaccctgaccctgttcgaggaccgggagatgatcgaggagcggctgaagacctacgcccacctgttcgacgacaaggtgatgaagcagctgaagcggcggcggtacaccggctggggccggctgtcccggaagctgatcaacggcatccgggacaagcagtccggcaagaccatcctggacttcctgaagtccgacggcttcgccaaccggaacttcatgcagctgatccacgacgactccctgaccttcaaggaggacatccagaaggcccaggtgtccggccagggcgactccctgcacgagcacatcgccaacctggccggctcccccgccatcaagaagggcatcctgcagaccgtgaaggtggtggacgagctggtgaaggtgatgggccggcacaagcccgagaacatcgtgatcgagatggcccgggagaaccagaccacccagaagggccagaagaactcccgggagcggatgaagcggatcgaggagggcatcaaggagctgggctcccagatcctgaaggagcaccccgtggagaacacccagctgcagaacgagaagctgtacctgtactacctgcagaacggccgggacatgtacgtggaccaggagctggacatcaaccggctgtccgactacgacgtggacgccatcgtgccccagtccttcctgaaggacgactccatcgacaacaaggtgctgacccggtccgacaagaaccggggcaagtccgacaacgtgccctccgaggaggtggtgaagaagatgaagaactactggcggcagctgctgaacgccaagctgatcacccagcggaagttcgacaacctgaccaaggccgagcggggcggcctgtccgagctggacaaggccggcttcatcaagcggcagctggtggagacccggcagatcaccaagcacgtggcccagatcctggactcccggatgaacaccaagtacgacgagaacgacaagctgatccgggaggtgaaggtgatcaccctgaagtccaagctggtgtccgacttccggaaggacttccagttctacaaggtgcgggagatcaacaactaccaccacgcccacgacgcctacctgaacgccgtggtgggcaccgccctgatcaagaagtaccccaagctggagtccgagttcgtgtacggcgactacaaggtgtacgacgtgcggaagatgatcgccaagtccgagcaggagatcggcaaggccaccgccaagtacttcttctactccaacatcatgaacttcttcaagaccgagatcaccctggccaacggcgagatccggaagcggcccctgatcgagaccaacggcgagaccggcgagatcgtgtgggacaagggccgggacttcgccaccgtgcggaaggtgctgtccatgccccaggtgaacatcgtgaagaagaccgaggtgcagaccggcggcttctccaaggagtccatcctgcccaagcggaactccgacaagctgatcgcccggaagaaggactgggaccccaagaagtacggcggcttcgactcccccaccgtggcctactccgtgctggtggtggccaaggtggagaagggcaagtccaagaagctgaagtccgtgaaggagctgctgggcatcaccatcatggagcggtcctccttcgagaagaaccccatcgacttcctggaggccaagggctacaaggaggtgaagaaggacctgatcatcaagctgcccaagtactccctgttcgagctggagaacggccggaagcggatgctggcctccgccggcgagctgcagaagggcaacgagctggccctgccctccaagtacgtgaacttcctgtacctggcctcccactacgagaagctgaagggctcccccgaggacaacgagcagaagcagctgttcgtggagcagcacaagcactacctggacgagatcatcgagcagatctccgagttctccaagcgggtgatcctggccgacgccaacctggacaaggtgctgtccgcctacaacaagcaccgggacaagcccatccgggagcaggccgagaacatcatccacctgttcaccctgaccaacctgggcgcccccgccgccttcaagtacttcgacaccaccatcgaccggaagcggtacacctccaccaaggaggtgctggacgccaccctgatccaccagtccatcaccggcctgtacgagacccggatcgacctgtcccagctgggcggcgacggctccggctcccccaagaagaagcggaaggtggacggctcccccaagaagaagcggaaggtggactccggctga

SEQ ID NO: 320 - DNA, 4179 bp, Artificial Sequence
  Synthetic: Cas9 ORF using low A/U codons of Table 4, with two C-terminal NLS sequences and start and stop codons
atggacaagaagtacagcatcggcctggacatcggcaccaacagcgtgggctgggccgtgatcaccgacgagtacaaggtgcccagcaagaagttcaaggtgctgggcaacaccgaccggcacagcatcaagaagaacctgatcggcgccctgctgttcgacagcggcgagaccgccgaggccacccggctgaagcggaccgcccggcggcggtacacccggcggaagaaccggatctgctacctgcaggagatcttcagcaacgagatggccaaggtggacgacagcttcttccaccggctggaggagagcttcctggtggaggaggacaagaagcacgagcggcaccccatcttcggcaacatcgtggacgaggtggcctaccacgagaagtaccccaccatctaccacctgcggaagaagctggtggacagcaccgacaaggccgacctgcggctgatctacctggccctggcccacatgatcaagttccggggccacttcctgatcgagggcgacctgaaccccgacaacagcgacgtggacaagctgttcatccagctggtgcagacctacaaccagctgttcgaggagaaccccatcaacgccagcggcgtggacgccaaggccatcctgagcgcccggctgagcaagagccggcggctggagaacctgatcgcccagctgcccggcgagaagaagaacggcctgttcggcaacctgatcgccctgagcctgggcctgacccccaacttcaagagcaacttcgacctggccgaggacgccaagctgcagctgagcaaggacacctacgacgacgacctggacaacctgctggcccagatcggcgaccagtacgccgacctgttcctggccgccaagaacctgagcgacgccatcctgctgagcgacatcctgcgggtgaacaccgagatcaccaaggcccccctgagcgccagcatgatcaagcggtacgacgagcaccaccaggacctgaccctgctgaaggccctggtgcggcagcagctgcccgagaagtacaaggagatcttcttcgaccagagcaagaacggctacgccggctacatcgacggcggcgccagccaggaggagttctacaagttcatcaagcccatcctggagaagatggacggcaccgaggagctgctggtgaagctgaaccgggaggacctgctgcggaagcagcggaccttcgacaacggcagcatcccccaccagatccacctgggcgagctgcacgccatcctgcggcggcaggaggacttctaccccttcctgaaggacaaccgggagaagatcgagaagatcctgaccttccggatcccctactacgtgggccccctggcccggggcaacagccggttcgcctggatgacccggaagagcgaggagaccatcaccccctggaacttcgaggaggtggtggacaagggcgccagcgcccagagcttcatcgagcggatgaccaacttcgacaagaacctgcccaacgagaaggtgctgcccaagcacagcctgctgtacgagtacttcaccgtgtacaacgagctgaccaaggtgaagtacgtgaccgagggcatgcggaagcccgccttcctgagcggcgagcagaagaaggccatcgtggacctgctgttcaagaccaaccggaaggtgaccgtgaagcagctgaaggaggactacttcaagaagatcgagtgcttcgacagcgtggagatcagcggcgtggaggaccggttcaacgccagcctgggcacctaccacgacctgctgaagatcatcaaggacaaggacttcctggacaacgaggagaacgaggacatcctggaggacatcgtgctgaccctgaccctgttcgaggaccgggagatgatcgaggagcggctgaagacctacgcccacctgttcgacgacaaggtgatgaagcagctgaagcggcggcggtacaccggctggggccggctgagccggaagctgatcaacggcatccgggacaagcagagcggcaagaccatcctggacttcctgaagagcgacggcttcgccaaccggaacttcatgcagctgatccacgacgacagcctgaccttcaaggaggacatccagaaggcccaggtgagcggccagggcgacagcctgcacgagcacatcgccaacctggccggcagccccgccatcaagaagggcatcctgcagaccgtgaaggtggtggacgagctggtgaaggtgatgggccggcacaagcccgagaacatcgtgatcgagatggcccgggagaaccagaccacccagaagggccagaagaacagccgggagcggatgaagcggatcgaggagggcatcaaggagctgggcagccagatcctgaaggagcaccccgtggagaacacccagctgcagaacgagaagctgtacctgtactacctgcagaacggccgggacatgtacgtggaccaggagctggacatcaaccggctgagcgactacgacgtggaccacatcgtgccccagagcttcctgaaggacgacagcatcgacaacaaggtgctgacccggagcgacaagaaccggggcaagagcgacaacgtgcccagcgaggaggtggtgaagaagatgaagaactactggcggcagctgctgaacgccaagctgatcacccagcggaagttcgacaacctgaccaaggccgagcggggcggcctgagcgagctggacaaggccggcttcatcaagcggcagctggtggagacccggcagatcaccaagcacgtggcccagatcctggacagccggatgaacaccaagtacgacgagaacgacaagctgatccgggaggtgaaggtgatcaccctgaagagcaagctggtgagcgacttccggaaggacttccagttctacaaggtgcgggagatcaacaactaccaccacgcccacgacgcctacctgaacgccgtggtgggcaccgccctgatcaagaagtaccccaagctggagagcgagttcgtgtacggcgactacaaggtgtacgacgtgcggaagatgatcgccaagagcgagcaggagatcggcaaggccaccgccaagtacttcttctacagcaacatcatgaacttcttcaagaccgagatcaccctggccaacggcgagatccggaagcggcccctgatcgagaccaacggcgagaccggcgagatcgtgtgggacaagggccgggacttcgccaccgtgcggaaggtgctgagcatgccccaggtgaacatcgtgaagaagaccgaggtgcagaccggcggcttcagcaaggagagcatcctgcccaagcggaacagcgacaagctgatcgcccggaagaaggactgggaccccaagaagtacggcggcttcgacagccccaccgtggcctacagcgtgctggtggtggccaaggtggagaagggcaagagcaagaagctgaagagcgtgaaggagctgctgggcatcaccatcatggagcggagcagcttcgagaagaaccccatcgacttcctggaggccaagggctacaaggaggtgaagaaggacctgatcatcaagctgcccaagtacagcctgttcgagctggagaacggccggaagcggatgctggccagcgccggcgagctgcagaagggcaacgagctggccctgcccagcaagtacgtgaacttcctgtacctggccagccactacgagaagctgaagggcagccccgaggacaacgagcagaagcagctgttcgtggagcagcacaagcactacctggacgagatcatcgagcagatcagcgagttcagcaagcgggtgatcctggccgacgccaacctggacaaggtgctgagcgcctacaacaagcaccgggacaagcccatccgggagcaggccgagaacatcatccacctgttcaccctgaccaacctgggcgcccccgccgccttcaagtacttcgacaccaccatcgaccggaagcggtacaccagcaccaaggaggtgctggacgccaccctgatccaccagagcatcaccggcctgtacgagacccggatcgacctgagccagctgggcggcgacggcagcggcagccccaagaagaagcggaaggtggacggcagccccaagaagaagcggaaggtggacagcggctga

SEQ ID NO: 321 - DNA, 4107 bp, Artificial Sequence
  Synthetic: Cas9 ORF using low A/U codons of Table 4, with start and stop codons and no NLS
atggacaagaagtacagcatcggcctggacatcggcaccaacagcgtgggctgggccgtgatcaccgacgagtacaaggtgcccagcaagaagttcaaggtgctgggcaacaccgaccggcacagcatcaagaagaacctgatcggcgccctgctgttcgacagcggcgagaccgccgaggccacccggctgaagcggaccgcccggcggcggtacacccggcggaagaaccggatctgctacctgcaggagatcttcagcaacgagatggccaaggtggacgacagcttcttccaccggctggaggagagcttcctggtggaggaggacaagaagcacgagcggcaccccatcttcggcaacatcgtggacgaggtggcctaccacgagaagtaccccaccatctaccacctgcggaagaagctggtggacagcaccgacaaggccgacctgcggctgatctacctggccctggcccacatgatcaagttccggggccacttcctgatcgagggcgacctgaaccccgacaacagcgacgtggacaagctgttcatccagctggtgcagacctacaaccagctgttcgaggagaaccccatcaacgccagcggcgtggacgccaaggccatcctgagcgcccggctgagcaagagccggcggctggagaacctgatcgcccagctgcccggcgagaagaagaacggcctgttcggcaacctgatcgccctgagcctgggcctgacccccaacttcaagagcaacttcgacctggccgaggacgccaagctgcagctgagcaaggacacctacgacgacgacctggacaacctgctggcccagatcggcgaccagtacgccgacctgttcctggccgccaagaacctgagcgacgccatcctgctgagcgacatcctgcgggtgaacaccgagatcaccaaggcccccctgagcgccagcatgatcaagcggtacgacgagcaccaccaggacctgaccctgctgaaggccctggtgcggcagcagctgcccgagaagtacaaggagatcttcttcgaccagagcaagaacggctacgccggctacatcgacggcggcgccagccaggaggagttctacaagttcatcaagcccatcctggagaagatggacggcaccgaggagctgctggtgaagctgaaccgggaggacctgctgcggaagcagcggaccttcgacaacggcagcatcccccaccagatccacctgggcgagctgcacgccatcctgcggcggcaggaggacttctaccccttcctgaaggacaaccgggagaagatcgagaagatcctgaccttccggatcccctactacgtgggccccctggcccggggcaacagccggttcgcctggatgacccggaagagcgaggagaccatcaccccctggaacttcgaggaggtggtggacaagggcgccagcgcccagagcttcatcgagcggatgaccaacttcgacaagaacctgcccaacgagaaggtgctgcccaagcacagcctgctgtacgagtacttcaccgtgtacaacgagctgaccaaggtgaagtacgtgaccgagggcatgcggaagcccgccttcctgagcggcgagcagaagaaggccatcgtggacctgctgttcaagaccaaccggaaggtgaccgtgaagcagctgaaggaggactacttcaagaagatcgagtgcttcgacagcgtggagatcagcggcgtggaggaccggttcaacgccagcctgggcacctaccacgacctgctgaagatcatcaaggacaaggacttcctggacaacgaggagaacgaggacatcctggaggacatcgtgctgaccctgaccctgttcgaggaccgggagatgatcgaggagcggctgaagacctacgcccacctgttcgacgacaaggtgatgaagcagctgaagcggcggcggtacaccggctggggccggctgagccggaagctgatcaacggcatccgggacaagcagagcggcaagaccatcctggacttcctgaagagcgacggcttcgccaaccggaacttcatgcagctgatccacgacgacagcctgaccttcaaggaggacatccagaaggcccaggtgagcggccagggcgacagcctgcacgagcacatcgccaacctggccggcagccccgccatcaagaagggcatcctgcagaccgtgaaggtggtggacgagctggtgaaggtgatgggccggcacaagcccgagaacatcgtgatcgagatggcccgggagaaccagaccacccagaagggccagaagaacagccgggagcggatgaagcggatcgaggagggcatcaaggagctgggcagccagatcctgaaggagcaccccgtggagaacacccagctgcagaacgagaagctgtacctgtactacctgcagaacggccgggacatgtacgtggaccaggagctggacatcaaccggctgagcgactacgacgtggaccacatcgtgccccagagcttcctgaaggacgacagcatcgacaacaaggtgctgacccggagcgacaagaaccggggcaagagcgacaacgtgcccagcgaggaggtggtgaagaagatgaagaactactggcggcagctgctgaacgccaagctgatcacccagcggaagttcgacaacctgaccaaggccgagcggggcggcctgagcgagctggacaaggccggcttcatcaagcggcagctggtggagacccggcagatcaccaagcacgtggcccagatcctggacagccggatgaacaccaagtacgacgagaacgacaagctgatccgggaggtgaaggtgatcaccctgaagagcaagctggtgagcgacttccggaaggacttccagttctacaaggtgcgggagatcaacaactaccaccacgcccacgacgcctacctgaacgccgtggtgggcaccgccctgatcaagaagtaccccaagctggagagcgagttcgtgtacggcgactacaaggtgtacgacgtgcggaagatgatcgccaagagcgagcaggagatcggcaaggccaccgccaagtacttcttctacagcaacatcatgaacttcttcaagaccgagatcaccctggccaacggcgagatccggaagcggcccctgatcgagaccaacggcgagaccggcgagatcgtgtgggacaagggccgggacttcgccaccgtgcggaaggtgctgagcatgccccaggtgaacatcgtgaagaagaccgaggtgcagaccggcggcttcagcaaggagagcatcctgcccaagcggaacagcgacaagctgatcgcccggaagaaggactgggaccccaagaagtacggcggcttcgacagccccaccgtggcctacagcgtgctggtggtggccaaggtggagaagggcaagagcaagaagctgaagagcgtgaaggagctgctgggcatcaccatcatggagcggagcagcttcgagaagaaccccatcgacttcctggaggccaagggctacaaggaggtgaagaaggacctgatcatcaagctgcccaagtacagcctgttcgagctggagaacggccggaagcggatgctggccagcgccggcgagctgcagaagggcaacgagctggccctgcccagcaagtacgtgaacttcctgtacctggccagccactacgagaagctgaagggcagccccgaggacaacgagcagaagcagctgttcgtggagcagcacaagcactacctggacgagatcatcgagcagatcagcgagttcagcaagcgggtgatcctggccgacgccaacctggacaaggtgctgagcgcctacaacaagcaccgggacaagcccatccgggagcaggccgagaacatcatccacctgttcaccctgaccaacctgggcgcccccgccgccttcaagtacttcgacaccaccatcgaccggaagcggtacaccagcaccaaggaggtgctggacgccaccctgatccaccagagcatcaccggcctgtacgagacccggatcgacctgagccagctgggcggcgactga

SEQ ID NO: 322 - DNA, 4140 bp, Artificial Sequence
  Synthetic: Cas9 nickase ORF using low A/U codons of Table 4, with start and stop codons
atggacaagaagtacagcatcggcctggccatcggcaccaacagcgtgggctgggccgtgatcaccgacgagtacaaggtgcccagcaagaagttcaaggtgctgggcaacaccgaccggcacagcatcaagaagaacctgatcggcgccctgctgttcgacagcggcgagaccgccgaggccacccggctgaagcggaccgcccggcggcggtacacccggcggaagaaccggatctgctacctgcaggagatcttcagcaacgagatggccaaggtggacgacagcttcttccaccggctggaggagagcttcctggtggaggaggacaagaagcacgagcggcaccccatcttcggcaacatcgtggacgaggtggcctaccacgagaagtaccccaccatctaccacctgcggaagaagctggtggacagcaccgacaaggccgacctgcggctgatctacctggccctggcccacatgatcaagttccggggccacttcctgatcgagggcgacctgaaccccgacaacagcgacgtggacaagctgttcatccagctggtgcagacctacaaccagctgttcgaggagaaccccatcaacgccagcggcgtggacgccaaggccatcctgagcgcccggctgagcaagagccggcggctggagaacctgatcgcccagctgcccggcgagaagaagaacggcctgttcggcaacctgatcgccctgagcctgggcctgacccccaacttcaagagcaacttcgacctggccgaggacgccaagctgcagctgagcaaggacacctacgacgacgacctggacaacctgctggcccagatcggcgaccagtacgccgacctgttcctggccgccaagaacctgagcgacgccatcctgctgagcgacatcctgcgggtgaacaccgagatcaccaaggcccccctgagcgccagcatgatcaagcggtacgacgagcaccaccaggacctgaccctgctgaaggccctggtgcggcagcagctgcccgagaagtacaaggagatcttcttcgaccagagcaagaacggctacgccggctacatcgacggcggcgccagccaggaggagttctacaagttcatcaagcccatcctggagaagatggacggcaccgaggagctgctggtgaagctgaaccgggaggacctgctgcggaagcagcggaccttcgacaacggcagcatcccccaccagatccacctgggcgagctgcacgccatcctgcggcggcaggaggacttctaccccttcctgaaggacaaccgggagaagatcgagaagatcctgaccttccggatcccctactacgtgggccccctggcccggggcaacagccggttcgcctggatgacccggaagagcgaggagaccatcaccccctggaacttcgaggaggtggtggacaagggcgccagcgcccagagcttcatcgagcggatgaccaacttcgacaagaacctgcccaacgagaaggtgctgcccaagcacagcctgctgtacgagtacttcaccgtgtacaacgagctgaccaaggtgaagtacgtgaccgagggcatgcggaagcccgccttcctgagcggcgagcagaagaaggccatcgtggacctgctgttcaagaccaaccggaaggtgaccgtgaagcagctgaaggaggactacttcaagaagatcgagtgcttcgacagcgtggagatcagcggcgtggaggaccggttcaacgccagcctgggcacctaccacgacctgctgaagatcatcaaggacaaggacttcctggacaacgaggagaacgaggacatcctggaggacatcgtgctgaccctgaccctgttcgaggaccgggagatgatcgaggagcggctgaagacctacgcccacctgttcgacgacaaggtgatgaagcagctgaagcggcggcggtacaccggctggggccggctgagccggaagctgatcaacggcatccgggacaagcagagcggcaagaccatcctggacttcctgaagagcgacggcttcgccaaccggaacttcatgcagctgatccacgacgacagcctgaccttcaaggaggacatccagaaggcccaggtgagcggccagggcgacagcctgcacgagcacatcgccaacctggccggcagccccgccatcaagaagggcatcctgcagaccgtgaaggtggtggacgagctggtgaaggtgatgggccggcacaagcccgagaacatcgtgatcgagatggcccgggagaaccagaccacccagaagggccagaagaacagccgggagcggatgaagcggatcgaggagggcatcaaggagctgggcagccagatcctgaaggagcaccccgtggagaacacccagctgcagaacgagaagctgtacctgtactacctgcagaacggccgggacatgtacgtggaccaggagctggacatcaaccggctgagcgactacgacgtggaccacatcgtgccccagagcttcctgaaggacgacagcatcgacaacaaggtgctgacccggagcgacaagaaccggggcaagagcgacaacgtgcccagcgaggaggtggtgaagaagatgaagaactactggcggcagctgctgaacgccaagctgatcacccagcggaagttcgacaacctgaccaaggccgagcggggcggcctgagcgagctggacaaggccggcttcatcaagcggcagctggtggagacccggcagatcaccaagcacgtggcccagatcctggacagccggatgaacaccaagtacgacgagaacgacaagctgatccgggaggtgaaggtgatcaccctgaagagcaagctggtgagcgacttccggaaggacttccagttctacaaggtgcgggagatcaacaactaccaccacgcccacgacgcctacctgaacgccgtggtgggcaccgccctgatcaagaagtaccccaagctggagagcgagttcgtgtacggcgactacaaggtgtacgacgtgcggaagatgatcgccaagagcgagcaggagatcggcaaggccaccgccaagtacttcttctacagcaacatcatgaacttcttcaagaccgagatcaccctggccaacggcgagatccggaagcggcccctgatcgagaccaacggcgagaccggcgagatcgtgtgggacaagggccgggacttcgccaccgtgcggaaggtgctgagcatgccccaggtgaacatcgtgaagaagaccgaggtgcagaccggcggcttcagcaaggagagcatcctgcccaagcggaacagcgacaagctgatcgcccggaagaaggactgggaccccaagaagtacggcggcttcgacagccccaccgtggcctacagcgtgctggtggtggccaaggtggagaagggcaagagcaagaagctgaagagcgtgaaggagctgctgggcatcaccatcatggagcggagcagcttcgagaagaaccccatcgacttcctggaggccaagggctacaaggaggtgaagaaggacctgatcatcaagctgcccaagtacagcctgttcgagctggagaacggccggaagcggatgctggccagcgccggcgagctgcagaagggcaacgagctggccctgcccagcaagtacgtgaacttcctgtacctggccagccactacgagaagctgaagggcagccccgaggacaacgagcagaagcagctgttcgtggagcagcacaagcactacctggacgagatcatcgagcagatcagcgagttcagcaagcgggtgatcctggccgacgccaacctggacaaggtgctgagcgcctacaacaagcaccgggacaagcccatccgggagcaggccgagaacatcatccacctgttcaccctgaccaacctgggcgcccccgccgccttcaagtacttcgacaccaccatcgaccggaagcggtacaccagcaccaaggaggtgctggacgccaccctgatccaccagagcatcaccggcctgtacgagacccggatcgacctgagccagctgggcggcgacggcggcggcagccccaagaagaagcggaaggtgtga

SEQ ID NO: 323 - DNA, 4179 bp, Artificial Sequence
  Synthetic: Cas9 nickase ORF using low A/U codons of Table 4, with two C-terminal NLS sequences and start and stop codons
atggacaagaagtacagcatcggcctggccatcggcaccaacagcgtgggctgggccgtgatcaccgacgagtacaaggtgcccagcaagaagttcaaggtgctgggcaacaccgaccggcacagcatcaagaagaacctgatcggcgccctgctgttcgacagcggcgagaccgccgaggccacccggctgaagcggaccgcccggcggcggtacacccggcggaagaaccggatctgctacctgcaggagatcttcagcaacgagatggccaaggtggacgacagcttcttccaccggctggaggagagcttcctggtggaggaggacaagaagcacgagcggcaccccatcttcggcaacatcgtggacgaggtggcctaccacgagaagtaccccaccatctaccacctgcggaagaagctggtggacagcaccgacaaggccgacctgcggctgatctacctggccctggcccacatgatcaagttccggggccacttcctgatcgagggcgacctgaaccccgacaacagcgacgtggacaagctgttcatccagctggtgcagacctacaaccagctgttcgaggagaaccccatcaacgccagcggcgtggacgccaaggccatcctgagcgcccggctgagcaagagccggcggctggagaacctgatcgcccagctgcccggcgagaagaagaacggcctgttcggcaacctgatcgccctgagcctgggcctgacccccaacttcaagagcaacttcgacctggccgaggacgccaagctgcagctgagcaaggacacctacgacgacgacctggacaacctgctggcccagatcggcgaccagtacgccgacctgttcctggccgccaagaacctgagcgacgccatcctgctgagcgacatcctgcgggtgaacaccgagatcaccaaggcccccctgagcgccagcatgatcaagcggtacgacgagcaccaccaggacctgaccctgctgaaggccctggtgcggcagcagctgcccgagaagtacaaggagatcttcttcgaccagagcaagaacggctacgccggctacatcgacggcggcgccagccaggaggagttctacaagttcatcaagcccatcctggagaagatggacggcaccgaggagctgctggtgaagctgaaccgggaggacctgctgcggaagcagcggaccttcgacaacggcagcatcccccaccagatccacctgggcgagctgcacgccatcctgcggcggcaggaggacttctaccccttcctgaaggacaaccgggagaagatcgagaagatcctgaccttccggatcccctactacgtgggccccctggcccggggcaacagccggttcgcctggatgacccggaagagcgaggagaccatcaccccctggaacttcgaggaggtggtggacaagggcgccagcgcccagagcttcatcgagcggatgaccaacttcgacaagaacctgcccaacgagaaggtgctgcccaagcacagcctgctgtacgagtacttcaccgtgtacaacgagctgaccaaggtgaagtacgtgaccgagggcatgcggaagcccgccttcctgagcggcgagcagaagaaggccatcgtggacctgctgttcaagaccaaccggaaggtgaccgtgaagcagctgaaggaggactacttcaagaagatcgagtgcttcgacagcgtggagatcagcggcgtggaggaccggttcaacgccagcctgggcacctaccacgacctgctgaagatcatcaaggacaaggacttcctggacaacgaggagaacgaggacatcctggaggacatcgtgctgaccctgaccctgttcgaggaccgggagatgatcgaggagcggctgaagacctacgcccacctgttcgacgacaaggtgatgaagcagctgaagcggcggcggtacaccggctggggccggctgagccggaagctgatcaacggcatccgggacaagcagagcggcaagaccatcctggacttcctgaagagcgacggcttcgccaaccggaacttcatgcagctgatccacgacgacagcctgaccttcaaggaggacatccagaaggcccaggtgagcggccagggcgacagcctgcacgagcacatcgccaacctggccggcagccccgccatcaagaagggcatcctgcagaccgtgaaggtggtggacgagctggtgaaggtgatgggccggcacaagcccgagaacatcgtgatcgagatggcccgggagaaccagaccacccagaagggccagaagaacagccgggagcggatgaagcggatcgaggagggcatcaaggagctgggcagccagatcctgaaggagcaccccgtggagaacacccagctgcagaacgagaagctgtacctgtactacctgcagaacggccgggacatgtacgtggaccaggagctggacatcaaccggctgagcgactacgacgtggaccacatcgtgccccagagcttcctgaaggacgacagcatcgacaacaaggtgctgacccggagcgacaagaaccggggcaagagcgacaacgtgcccagcgaggaggtggtgaagaagatgaagaactactggcggcagctgctgaacgccaagctgatcacccagcggaagttcgacaacctgaccaaggccgagcggggcggcctgagcgagctggacaaggccggcttcatcaagcggcagctggtggagacccggcagatcaccaagcacgtggcccagatcctggacagccggatgaacaccaagtacgacgagaacgacaagctgatccgggaggtgaaggtgatcaccctgaagagcaagctggtgagcgacttccggaaggacttccagttctacaaggtgcgggagatcaacaactaccaccacgcccacgacgcctacctgaacgccgtggtgggcaccgccctgatcaagaagtaccccaagctggagagcgagttcgtgtacggcgactacaaggtgtacgacgtgcggaagatgatcgccaagagcgagcaggagatcggcaaggccaccgccaagtacttcttctacagcaacatcatgaacttcttcaagaccgagatcaccctggccaacggcgagatccggaagcggcccctgatcgagaccaacggcgagaccggcgagatcgtgtgggacaagggccgggacttcgccaccgtgcggaaggtgctgagcatgccccaggtgaacatcgtgaagaagaccgaggtgcagaccggcggcttcagcaaggagagcatcctgcccaagcggaacagcgacaagctgatcgcccggaagaaggactgggaccccaagaagtacggcggcttcgacagccccaccgtggcctacagcgtgctggtggtggccaaggtggagaagggcaagagcaagaagctgaagagcgtgaaggagctgctgggcatcaccatcatggagcggagcagcttcgagaagaaccccatcgacttcctggaggccaagggctacaaggaggtgaagaaggacctgatcatcaagctgcccaagtacagcctgttcgagctggagaacggccggaagcggatgctggccagcgccggcgagctgcagaagggcaacgagctggccctgcccagcaagtacgtgaacttcctgtacctggccagccactacgagaagctgaagggcagccccgaggacaacgagcagaagcagctgttcgtggagcagcacaagcactacctggacgagatcatcgagcagatcagcgagttcagcaagcgggtgatcctggccgacgccaacctggacaaggtgctgagcgcctacaacaagcaccgggacaagcccatccgggagcaggccgagaacatcatccacctgttcaccctgaccaacctgggcgcccccgccgccttcaagtacttcgacaccaccatcgaccggaagcggtacaccagcaccaaggaggtgctggacgccaccctgatccaccagagcatcaccggcctgtacgagacccggatcgacctgagccagctgggcggcgacggcagcggcagccccaagaagaagcggaaggtggacggcagccccaagaagaagcggaaggtggacagcggctga

SEQ ID NO: 324 - DNA, 4107 bp, Artificial Sequence
  Synthetic: Cas9 nickase ORF using low A/U codons of Table 4, with start and stop codons and no NLS
atggacaagaagtacagcatcggcctggccatcggcaccaacagcgtgggctgggccgtgatcaccgacgagtacaaggtgcccagcaagaagttcaaggtgctgggcaacaccgaccggcacagcatcaagaagaacctgatcggcgccctgctgttcgacagcggcgagaccgccgaggccacccggctgaagcggaccgcccggcggcggtacacccggcggaagaaccggatctgctacctgcaggagatcttcagcaacgagatggccaaggtggacgacagcttcttccaccggctggaggagagcttcctggtggaggaggacaagaagcacgagcggcaccccatcttcggcaacatcgtggacgaggtggcctaccacgagaagtaccccaccatctaccacctgcggaagaagctggtggacagcaccgacaaggccgacctgcggctgatctacctggccctggcccacatgatcaagttccggggccacttcctgatcgagggcgacctgaaccccgacaacagcgacgtggacaagctgttcatccagctggtgcagacctacaaccagctgttcgaggagaaccccatcaacgccagcggcgtggacgccaaggccatcctgagcgcccggctgagcaagagccggcggctggagaacctgatcgcccagctgcccggcgagaagaagaacggcctgttcggcaacctgatcgccctgagcctgggcctgacccccaacttcaagagcaacttcgacctggccgaggacgccaagctgcagctgagcaaggacacctacgacgacgacctggacaacctgctggcccagatcggcgaccagtacgccgacctgttcctggccgccaagaacctgagcgacgccatcctgctgagcgacatcctgcgggtgaacaccgagatcaccaaggcccccctgagcgccagcatgatcaagcggtacgacgagcaccaccaggacctgaccctgctgaaggccctggtgcggcagcagctgcccgagaagtacaaggagatcttcttcgaccagagcaagaacggctacgccggctacatcgacggcggcgccagccaggaggagttctacaagttcatcaagcccatcctggagaagatggacggcaccgaggagctgctggtgaagctgaaccgggaggacctgctgcggaagcagcggaccttcgacaacggcagcatcccccaccagatccacctgggcgagctgcacgccatcctgcggcggcaggaggacttctaccccttcctgaaggacaaccgggagaagatcgagaagatcctgaccttccggatcccctactacgtgggccccctggcccggggcaacagccggttcgcctggatgacccggaagagcgaggagaccatcaccccctggaacttcgaggaggtggtggacaagggcgccagcgcccagagcttcatcgagcggatgaccaacttcgacaagaacctgcccaacgagaaggtgctgcccaagcacagcctgctgtacgagtacttcaccgtgtacaacgagctgaccaaggtgaagtacgtgaccgagggcatgcggaagcccgccttcctgagcggcgagcagaagaaggccatcgtggacctgctgttcaagaccaaccggaaggtgaccgtgaagcagctgaaggaggactacttcaagaagatcgagtgcttcgacagcgtggagatcagcggcgtggaggaccggttcaacgccagcctgggcacctaccacgacctgctgaagatcatcaaggacaaggacttcctggacaacgaggagaacgaggacatcctggaggacatcgtgctgaccctgaccctgttcgaggaccgggagatgatcgaggagcggctgaagacctacgcccacctgttcgacgacaaggtgatgaagcagctgaagcggcggcggtacaccggctggggccggctgagccggaagctgatcaacggcatccgggacaagcagagcggcaagaccatcctggacttcctgaagagcgacggcttcgccaaccggaacttcatgcagctgatccacgacgacagcctgaccttcaaggaggacatccagaaggcccaggtgagcggccagggcgacagcctgcacgagcacatcgccaacctggccggcagccccgccatcaagaagggcatcctgcagaccgtgaaggtggtggacgagctggtgaaggtgatgggccggcacaagcccgagaacatcgtgatcgagatggcccgggagaaccagaccacccagaagggccagaagaacagccgggagcggatgaagcggatcgaggagggcatcaaggagctgggcagccagatcctgaaggagcaccccgtggagaacacccagctgcagaacgagaagctgtacctgtactacctgcagaacggccgggacatgtacgtggaccaggagctggacatcaaccggctgagcgactacgacgtggaccacatcgtgccccagagcttcctgaaggacgacagcatcgacaacaaggtgctgacccggagcgacaagaaccggggcaagagcgacaacgtgcccagcgaggaggtggtgaagaagatgaagaactactggcggcagctgctgaacgccaagctgatcacccagcggaagttcgacaacctgaccaaggccgagcggggcggcctgagcgagctggacaaggccggcttcatcaagcggcagctggtggagacccggcagatcaccaagcacgtggcccagatcctggacagccggatgaacaccaagtacgacgagaacgacaagctgatccgggaggtgaaggtgatcaccctgaagagcaagctggtgagcgacttccggaaggacttccagttctacaaggtgcgggagatcaacaactaccaccacgcccacgacgcctacctgaacgccgtggtgggcaccgccctgatcaagaagtaccccaagctggagagcgagttcgtgtacggcgactacaaggtgtacgacgtgcggaagatgatcgccaagagcgagcaggagatcggcaaggccaccgccaagtacttcttctacagcaacatcatgaacttcttcaagaccgagatcaccctggccaacggcgagatccggaagcggcccctgatcgagaccaacggcgagaccggcgagatcgtgtgggacaagggccgggacttcgccaccgtgcggaaggtgctgagcatgccccaggtgaacatcgtgaagaagaccgaggtgcagaccggcggcttcagcaaggagagcatcctgcccaagcggaacagcgacaagctgatcgcccggaagaaggactgggaccccaagaagtacggcggcttcgacagccccaccgtggcctacagcgtgctggtggtggccaaggtggagaagggcaagagcaagaagctgaagagcgtgaaggagctgctgggcatcaccatcatggagcggagcagcttcgagaagaaccccatcgacttcctggaggccaagggctacaaggaggtgaagaaggacctgatcatcaagctgcccaagtacagcctgttcgagctggagaacggccggaagcggatgctggccagcgccggcgagctgcagaagggcaacgagctggccctgcccagcaagtacgtgaacttcctgtacctggccagccactacgagaagctgaagggcagccccgaggacaacgagcagaagcagctgttcgtggagcagcacaagcactacctggacgagatcatcgagcagatcagcgagttcagcaagcgggtgatcctggccgacgccaacctggacaaggtgctgagcgcctacaacaagcaccgggacaagcccatccgggagcaggccgagaacatcatccacctgttcaccctgaccaacctgggcgcccccgccgccttcaagtacttcgacaccaccatcgaccggaagcggtacaccagcaccaaggaggtgctggacgccaccctgatccaccagagcatcaccggcctgtacgagacccggatcgacctgagccagctgggcggcgactga

SEQ ID NO: 325 - DNA, 4140 bp, Artificial Sequence
  Synthetic: dCas9 ORF using low A/U codons of Table 4, with start and stop codons
atggacaagaagtacagcatcggcctggccatcggcaccaacagcgtgggctgggccgtgatcaccgacgagtacaaggtgcccagcaagaagttcaaggtgctgggcaacaccgaccggcacagcatcaagaagaacctgatcggcgccctgctgttcgacagcggcgagaccgccgaggccacccggctgaagcggaccgcccggcggcggtacacccggcggaagaaccggatctgctacctgcaggagatcttcagcaacgagatggccaaggtggacgacagcttcttccaccggctggaggagagcttcctggtggaggaggacaagaagcacgagcggcaccccatcttcggcaacatcgtggacgaggtggcctaccacgagaagtaccccaccatctaccacctgcggaagaagctggtggacagcaccgacaaggccgacctgcggctgatctacctggccctggcccacatgatcaagttccggggccacttcctgatcgagggcgacctgaaccccgacaacagcgacgtggacaagctgttcatccagctggtgcagacctacaaccagctgttcgaggagaaccccatcaacgccagcggcgtggacgccaaggccatcctgagcgcccggctgagcaagagccggcggctggagaacctgatcgcccagctgcccggcgagaagaagaacggcctgttcggcaacctgatcgccctgagcctgggcctgacccccaacttcaagagcaacttcgacctggccgaggacgccaagctgcagctgagcaaggacacctacgacgacgacctggacaacctgctggcccagatcggcgaccagtacgccgacctgttcctggccgccaagaacctgagcgacgccatcctgctgagcgacatcctgcgggtgaacaccgagatcaccaaggcccccctgagcgccagcatgatcaagcggtacgacgagcaccaccaggacctgaccctgctgaaggccctggtgcggcagcagctgcccgagaagtacaaggagatcttcttcgaccagagcaagaacggctacgccggctacatcgacggcggcgccagccaggaggagttctacaagttcatcaagcccatcctggagaagatggacggcaccgaggagctgctggtgaagctgaaccgggaggacctgctgcggaagcagcggaccttcgacaacggcagcatcccccaccagatccacctgggcgagctgcacgccatcctgcggcggcaggaggacttctaccccttcctgaaggacaaccgggagaagatcgagaagatcctgaccttccggatcccctactacgtgggccccctggcccggggcaacagccggttcgcctggatgacccggaagagcgaggagaccatcaccccctggaacttcgaggaggtggtggacaagggcgccagcgcccagagcttcatcgagcggatgaccaacttcgacaagaacctgcccaacgagaaggtgctgcccaagcacagcctgctgtacgagtacttcaccgtgtacaacgagctgaccaaggtgaagtacgtgaccgagggcatgcggaagcccgccttcctgagcggcgagcagaagaaggccatcgtggacctgctgttcaagaccaaccggaaggtgaccgtgaagcagctgaaggaggactacttcaagaagatcgagtgcttcgacagcgtggagatcagcggcgtggaggaccggttcaacgccagcctgggcacctaccacgacctgctgaagatcatcaaggacaaggacttcctggacaacgaggagaacgaggacatcctggaggacatcgtgctgaccctgaccctgttcgaggaccgggagatgatcgaggagcggctgaagacctacgcccacctgttcgacgacaaggtgatgaagcagctgaagcggcggcggtacaccggctggggccggctgagccggaagctgatcaacggcatccgggacaagcagagcggcaagaccatcctggacttcctgaagagcgacggcttcgccaaccggaacttcatgcagctgatccacgacgacagcctgaccttcaaggaggacatccagaaggcccaggtgagcggccagggcgacagcctgcacgagcacatcgccaacctggccggcagccccgccatcaagaagggcatcctgcagaccgtgaaggtggtggacgagctggtgaaggtgatgggccggcacaagcccgagaacatcgtgatcgagatggcccgggagaaccagaccacccagaagggccagaagaacagccgggagcggatgaagcggatcgaggagggcatcaaggagctgggcagccagatcctgaaggagcaccccgtggagaacacccagctgcagaacgagaagctgtacctgtactacctgcagaacggccgggacatgtacgtggaccaggagctggacatcaaccggctgagcgactacgacgtggacgccatcgtgccccagagcttcctgaaggacgacagcatcgacaacaaggtgctgacccggagcgacaagaaccggggcaagagcgacaacgtgcccagcgaggaggtggtgaagaagatgaagaactactggcggcagctgctgaacgccaagctgatcacccagcggaagttcgacaacctgaccaaggccgagcggggcggcctgagcgagctggacaaggccggcttcatcaagcggcagctggtggagacccggcagatcaccaagcacgtggcccagatcctggacagccggatgaacaccaagtacgacgagaacgacaagctgatccgggaggtgaaggtgatcaccctgaagagcaagctggtgagcgacttccggaaggacttccagttctacaaggtgcgggagatcaacaactaccaccacgcccacgacgcctacctgaacgccgtggtgggcaccgccctgatcaagaagtaccccaagctggagagcgagttcgtgtacggcgactacaaggtgtacgacgtgcggaagatgatcgccaagagcgagcaggagatcggcaaggccaccgccaagtacttcttctacagcaacatcatgaacttcttcaagaccgagatcaccctggccaacggcgagatccggaagcggcccctgatcgagaccaacggcgagaccggcgagatcgtgtgggacaagggccgggacttcgccaccgtgcggaaggtgctgagcatgccccaggtgaacatcgtgaagaagaccgaggtgcagaccggcggcttcagcaaggagagcatcctgcccaagcggaacagcgacaagctgatcgcccggaagaaggactgggaccccaagaagtacggcggcttcgacagccccaccgtggcctacagcgtgctggtggtggccaaggtggagaagggcaagagcaagaagctgaagagcgtgaaggagctgctgggcatcaccatcatggagcggagcagcttcgagaagaaccccatcgacttcctggaggccaagggctacaaggaggtgaagaaggacctgatcatcaagctgcccaagtacagcctgttcgagctggagaacggccggaagcggatgctggccagcgccggcgagctgcagaagggcaacgagctggccctgcccagcaagtacgtgaacttcctgtacctggccagccactacgagaagctgaagggcagccccgaggacaacgagcagaagcagctgttcgtggagcagcacaagcactacctggacgagatcatcgagcagatcagcgagttcagcaagcgggtgatcctggccgacgccaacctggacaaggtgctgagcgcctacaacaagcaccgggacaagcccatccgggagcaggccgagaacatcatccacctgttcaccctgaccaacctgggcgcccccgccgccttcaagtacttcgacaccaccatcgaccggaagcggtacaccagcaccaaggaggtgctggacgccaccctgatccaccagagcatcaccggcctgtacgagacccggatcgacctgagccagctgggcggcgacggcggcggcagccccaagaagaagcggaaggtgtga

SEQ ID NO: 326 - DNA, 4179 bp, Artificial Sequence
  Synthetic: dCas9 ORF using low A/U codons of Table 4, with two C-terminal NLS sequences and start and stop codons
atggacaagaagtacagcatcggcctggccatcggcaccaacagcgtgggctgggccgtgatcaccgacgagtacaaggtgcccagcaagaagttcaaggtgctgggcaacaccgaccggcacagcatcaagaagaacctgatcggcgccctgctgttcgacagcggcgagaccgccgaggccacccggctgaagcggaccgcccggcggcggtacacccggcggaagaaccggatctgctacctgcaggagatcttcagcaacgagatggccaaggtggacgacagcttcttccaccggctggaggagagcttcctggtggaggaggacaagaagcacgagcggcaccccatcttcggcaacatcgtggacgaggtggcctaccacgagaagtaccccaccatctaccacctgcggaagaagctggtggacagcaccgacaaggccgacctgcggctgatctacctggccctggcccacatgatcaagttccggggccacttcctgatcgagggcgacctgaaccccgacaacagcgacgtggacaagctgttcatccagctggtgcagacctacaaccagctgttcgaggagaaccccatcaacgccagcggcgtggacgccaaggccatcctgagcgcccggctgagcaagagccggcggctggagaacctgatcgcccagctgcccggcgagaagaagaacggcctgttcggcaacctgatcgccctgagcctgggcctgacccccaacttcaagagcaacttcgacctggccgaggacgccaagctgcagctgagcaaggacacctacgacgacgacctggacaacctgctggcccagatcggcgaccagtacgccgacctgttcctggccgccaagaacctgagcgacgccatcctgctgagcgacatcctgcgggtgaacaccgagatcaccaaggcccccctgagcgccagcatgatcaagcggtacgacgagcaccaccaggacctgaccctgctgaaggccctggtgcggcagcagctgcccgagaagtacaaggagatcttcttcgaccagagcaagaacggctacgccggctacatcgacggcggcgccagccaggaggagttctacaagttcatcaagcccatcctggagaagatggacggcaccgaggagctgctggtgaagctgaaccgggaggacctgctgcggaagcagcggaccttcgacaacggcagcatcccccaccagatccacctgggcgagctgcacgccatcctgcggcggcaggaggacttctaccccttcctgaaggacaaccgggagaagatcgagaagatcctgaccttccggatcccctactacgtgggccccctggcccggggcaacagccggttcgcctggatgacccggaagagcgaggagaccatcaccccctggaacttcgaggaggtggtggacaagggcgccagcgcccagagcttcatcgagcggatgaccaacttcgacaagaacctgcccaacgagaaggtgctgcccaagcacagcctgctgtacgagtacttcaccgtgtacaacgagctgaccaaggtgaagtacgtgaccgagggcatgcggaagcccgccttcctgagcggcgagcagaagaaggccatcgtggacctgctgttcaagaccaaccggaaggtgaccgtgaagcagctgaaggaggactacttcaagaagatcgagtgcttcgacagcgtggagatcagcggcgtggaggaccggttcaacgccagcctgggcacctaccacgacctgctgaagatcatcaaggacaaggacttcctggacaacgaggagaacgaggacatcctggaggacatcgtgctgaccctgaccctgttcgaggaccgggagatgatcgaggagcggctgaagacctacgcccacctgttcgacgacaaggtgatgaagcagctgaagcggcggcggtacaccggctggggccggctgagccggaagctgatcaacggcatccgggacaagcagagcggcaagaccatcctggacttcctgaagagcgacggcttcgccaaccggaacttcatgcagctgatccacgacgacagcctgaccttcaaggaggacatccagaaggcccaggtgagcggccagggcgacagcctgcacgagcacatcgccaacctggccggcagccccgccatcaagaagggcatcctgcagaccgtgaaggtggtggacgagctggtgaaggtgatgggccggcacaagcccgagaacatcgtgatcgagatggcccgggagaaccagaccacccagaagggccagaagaacagccgggagcggatgaagcggatcgaggagggcatcaaggagctgggcagccagatcctgaaggagcaccccgtggagaacacccagctgcagaacgagaagctgtacctgtactacctgcagaacggccgggacatgtacgtggaccaggagctggacatcaaccggctgagcgactacgacgtggacgccatcgtgccccagagcttcctgaaggacgacagcatcgacaacaaggtgctgacccggagcgacaagaaccggggcaagagcgacaacgtgcccagcgaggaggtggtgaagaagatgaagaactactggcggcagctgctgaacgccaagctgatcacccagcggaagttcgacaacctgaccaaggccgagcggggcggcctgagcgagctggacaaggccggcttcatcaagcggcagctggtggagacccggcagatcaccaagcacgtggcccagatcctggacagccggatgaacaccaagtacgacgagaacgacaagctgatccgggaggtgaaggtgatcaccctgaagagcaagctggtgagcgacttccggaaggacttccagttctacaaggtgcgggagatcaacaactaccaccacgcccacgacgcctacctgaacgccgtggtgggcaccgccctgatcaagaagtaccccaagctggagagcgagttcgtgtacggcgactacaaggtgtacgacgtgcggaagatgatcgccaagagcgagcaggagatcggcaaggccaccgccaagtacttcttctacagcaacatcatgaacttcttcaagaccgagatcaccctggccaacggcgagatccggaagcggcccctgatcgagaccaacggcgagaccggcgagatcgtgtgggacaagggccgggacttcgccaccgtgcggaaggtgctgagcatgccccaggtgaacatcgtgaagaagaccgaggtgcagaccggcggcttcagcaaggagagcatcctgcccaagcggaacagcgacaagctgatcgcccggaagaaggactgggaccccaagaagtacggcggcttcgacagccccaccgtggcctacagcgtgctggtggtggccaaggtggagaagggcaagagcaagaagctgaagagcgtgaaggagctgctgggcatcaccatcatggagcggagcagcttcgagaagaaccccatcgacttcctggaggccaagggctacaaggaggtgaagaaggacctgatcatcaagctgcccaagtacagcctgttcgagctggagaacggccggaagcggatgctggccagcgccggcgagctgcagaagggcaacgagctggccctgcccagcaagtacgtgaacttcctgtacctggccagccactacgagaagctgaagggcagccccgaggacaacgagcagaagcagctgttcgtggagcagcacaagcactacctggacgagatcatcgagcagatcagcgagttcagcaagcgggtgatcctggccgacgccaacctggacaaggtgctgagcgcctacaacaagcaccgggacaagcccatccgggagcaggccgagaacatcatccacctgttcaccctgaccaacctgggcgcccccgccgccttcaagtacttcgacaccaccatcgaccggaagcggtacaccagcaccaaggaggtgctggacgccaccctgatccaccagagcatcaccggcctgtacgagacccggatcgacctgagccagctgggcggcgacggcagcggcagccccaagaagaagcggaaggtggacggcagccccaagaagaagcggaaggtggacagcggctga

SEQ ID NO: 327 - DNA, 4107 bp, Artificial Sequence
  Synthetic: dCas9 ORF using low A/U codons of Table 4, with start and stop codons and no NLS
atggacaagaagtacagcatcggcctggccatcggcaccaacagcgtgggctgggccgtgatcaccgacgagtacaaggtgcccagcaagaagttcaaggtgctgggcaacaccgaccggcacagcatcaagaagaacctgatcggcgccctgctgttcgacagcggcgagaccgccgaggccacccggctgaagcggaccgcccggcggcggtacacccggcggaagaaccggatctgctacctgcaggagatcttcagcaacgagatggccaaggtggacgacagcttcttccaccggctggaggagagcttcctggtggaggaggacaagaagcacgagcggcaccccatcttcggcaacatcgtggacgaggtggcctaccacgagaagtaccccaccatctaccacctgcggaagaagctggtggacagcaccgacaaggccgacctgcggctgatctacctggccctggcccacatgatcaagttccggggccacttcctgatcgagggcgacctgaaccccgacaacagcgacgtggacaagctgttcatccagctggtgcagacctacaaccagctgttcgaggagaaccccatcaacgccagcggcgtggacgccaaggccatcctgagcgcccggctgagcaagagccggcggctggagaacctgatcgcccagctgcccggcgagaagaagaacggcctgttcggcaacctgatcgccctgagcctgggcctgacccccaacttcaagagcaacttcgacctggccgaggacgccaagctgcagctgagcaaggacacctacgacgacgacctggacaacctgctggcccagatcggcgaccagtacgccgacctgttcctggccgccaagaacctgagcgacgccatcctgctgagcgacatcctgcgggtgaacaccgagatcaccaaggcccccctgagcgccagcatgatcaagcggtacgacgagcaccaccaggacctgaccctgctgaaggccctggtgcggcagcagctgcccgagaagtacaaggagatcttcttcgaccagagcaagaacggctacgccggctacatcgacggcggcgccagccaggaggagttctacaagttcatcaagcccatcctggagaagatggacggcaccgaggagctgctggtgaagctgaaccgggaggacctgctgcggaagcagcggaccttcgacaacggcagcatcccccaccagatccacctgggcgagctgcacgccatcctgcggcggcaggaggacttctaccccttcctgaaggacaaccgggagaagatcgagaagatcctgaccttccggatcccctactacgtgggccccctggcccggggcaacagccggttcgcctggatgacccggaagagcgaggagaccatcaccccctggaacttcgaggaggtggtggacaagggcgccagcgcccagagcttcatcgagcggatgaccaacttcgacaagaacctgcccaacgagaaggtgctgcccaagcacagcctgctgtacgagtacttcaccgtgtacaacgagctgaccaaggtgaagtacgtgaccgagggcatgcggaagcccgccttcctgagcggcgagcagaagaaggccatcgtggacctgctgttcaagaccaaccggaaggtgaccgtgaagcagctgaaggaggactacttcaagaagatcgagtgcttcgacagcgtggagatcagcggcgtggaggaccggttcaacgccagcctgggcacctaccacgacctgctgaagatcatcaaggacaaggacttcctggacaacgaggagaacgaggacatcctggaggacatcgtgctgaccctgaccctgttcgaggaccgggagatgatcgaggagcggctgaagacctacgcccacctgttcgacgacaaggtgatgaagcagctgaagcggcggcggtacaccggctggggccggctgagccggaagctgatcaacggcatccgggacaagcagagcggcaagaccatcctggacttcctgaagagcgacggcttcgccaaccggaacttcatgcagctgatccacgacgacagcctgaccttcaaggaggacatccagaaggcccaggtgagcggccagggcgacagcctgcacgagcacatcgccaacctggccggcagccccgccatcaagaagggcatcctgcagaccgtgaaggtggtggacgagctggtgaaggtgatgggccggcacaagcccgagaacatcgtgatcgagatggcccgggagaaccagaccacccagaagggccagaagaacagccgggagcggatgaagcggatcgaggagggcatcaaggagctgggcagccagatcctgaaggagcaccccgtggagaacacccagctgcagaacgagaagctgtacctgtactacctgcagaacggccgggacatgtacgtggaccaggagctggacatcaaccggctgagcgactacgacgtggacgccatcgtgccccagagcttcctgaaggacgacagcatcgacaacaaggtgctgacccggagcgacaagaaccggggcaagagcgacaacgtgcccagcgaggaggtggtgaagaagatgaagaactactggcggcagctgctgaacgccaagctgatcacccagcggaagttcgacaacctgaccaaggccgagcggggcggcctgagcgagctggacaaggccggcttcatcaagcggcagctggtggagacccggcagatcaccaagcacgtggcccagatcctggacagccggatgaacaccaagtacgacgagaacgacaagctgatccgggaggtgaaggtgatcaccctgaagagcaagctggtgagcgacttccggaaggacttccagttctacaaggtgcgggagatcaacaactaccaccacgcccacgacgcctacctgaacgccgtggtgggcaccgccctgatcaagaagtaccccaagctggagagcgagttcgtgtacggcgactacaaggtgtacgacgtgcggaagatgatcgccaagagcgagcaggagatcggcaaggccaccgccaagtacttcttctacagcaacatcatgaacttcttcaagaccgagatcaccctggccaacggcgagatccggaagcggcccctgatcgagaccaacggcgagaccggcgagatcgtgtgggacaagggccgggacttcgccaccgtgcggaaggtgctgagcatgccccaggtgaacatcgtgaagaagaccgaggtgcagaccggcggcttcagcaaggagagcatcctgcccaagcggaacagcgacaagctgatcgcccggaagaaggactgggaccccaagaagtacggcggcttcgacagccccaccgtggcctacagcgtgctggtggtggccaaggtggagaagggcaagagcaagaagctgaagagcgtgaaggagctgctgggcatcaccatcatggagcggagcagcttcgagaagaaccccatcgacttcctggaggccaagggctacaaggaggtgaagaaggacctgatcatcaagctgcccaagtacagcctgttcgagctggagaacggccggaagcggatgctggccagcgccggcgagctgcagaagggcaacgagctggccctgcccagcaagtacgtgaacttcctgtacctggccagccactacgagaagctgaagggcagccccgaggacaacgagcagaagcagctgttcgtggagcagcacaagcactacctggacgagatcatcgagcagatcagcgagttcagcaagcgggtgatcctggccgacgccaacctggacaaggtgctgagcgcctacaacaagcaccgggacaagcccatccgggagcaggccgagaacatcatccacctgttcaccctgaccaacctgggcgcccccgccgccttcaagtacttcgacaccaccatcgaccggaagcggtacaccagcaccaaggaggtgctggacgccaccctgatccaccagagcatcaccggcctgtacgagacccggatcgacctgagccagctgggcggcgactga

SEQ ID NO: 328 - DNA, 3312 bp, Artificial Sequence
  Synthetic: Nme Cas9 ORF using low A codons of Table 4, with start and stop codons
atggccgccttcaagcccaactccatcaactacatcctgggcctggacatcggcatcgcctccgtgggctgggccatggtggagatcgacgaggaggagaaccccatccggctgatcgacctgggcgtgcgggtgttcgagcgggccgaggtgcccaagaccggcgactccctggccatggcccggcggctggcccggtccgtgcggcggctgacccggcggcgggcccaccggctgctgcggacccggcggctgctgaagcgggagggcgtgctgcaggccgccaacttcgacgagaacggcctgatcaagtccctgcccaacaccccctggcagctgcgggccgccgccctggaccggaagctgacccccctggagtggtccgccgtgctgctgcacctgatcaagcaccggggctacctgtcccagcggaagaacgagggcgagaccgccgacaaggagctgggcgccctgctgaagggcgtggccggcaacgcccacgccctgcagaccggcgacttccggacccccgccgagctggccctgaacaagttcgagaaggagtccggccacatccggaaccagcggtccgactactcccacaccttctcccggaaggacctgcaggccgagctgatcctgctgttcgagaagcagaaggagttcggcaacccccacgtgtccggcggcctgaaggagggcatcgagaccctgctgatgacccagcggcccgccctgtccggcgacgccgtgcagaagatgctgggccactgcaccttcgagcccgccgagcccaaggccgccaagaacacctacaccgccgagcggttcatctggctgaccaagctgaacaacctgcggatcctggagcagggctccgagcggcccctgaccgacaccgagcgggccaccctgatggacgagccctaccggaagtccaagctgacctacgcccaggcccggaagctgctgggcctggaggacaccgccttcttcaagggcctgcggtacggcaaggacaacgccgaggcctccaccctgatggagatgaaggcctaccacgccatctcccgggccctggagaaggagggcctgaaggacaagaagtcccccctgaacctgtcccccgagctgcaggacgagatcggcaccgccttctccctgttcaagaccgacgaggacatcaccggccggctgaaggaccggatccagcccgagatcctggaggccctgctgaagcacatctccttcgacaagttcgtgcagatctccctgaaggccctgcggcggatcgtgcccctgatggagcagggcaagcggtacgacgaggcctgcgccgagatctacggcgaccactacggcaagaagaacaccgaggagaagatctacctgccccccatccccgccgacgagatccggaaccccgtggtgctgcgggccctgtcccaggcccggaaggtgatcaacggcgtggtgcggcggtacggctcccccgcccggatccacatcgagaccgcccgggaggtgggcaagtccttcaaggaccggaaggagatcgagaagcggcaggaggagaaccggaaggaccgggagaaggccgccgccaagttccgggagtacttccccaacttcgtgggcgagcccaagtccaaggacatcctgaagctgcggctgtacgagcagcagcacggcaagtgcctgtactccggcaaggagatcaacctgggccggctgaacgagaagggctacgtggagatcgaccacgccctgcccttctcccggacctgggacgactccttcaacaacaaggtgctggtgctgggctccgagaaccagaacaagggcaaccagaccccctacgagtacttcaacggcaaggacaactcccgggagtggcaggagttcaaggcccgggtggagacctcccggttcccccggtccaagaagcagcggatcctgctgcagaagttcgacgaggacggcttcaaggagcggaacctgaacgacacccggtacgtgaaccggttcctgtgccagttcgtggccgaccggatgcggctgaccggcaagggcaagaagcgggtgttcgcctccaacggccagatcaccaacctgctgcggggcttctggggcctgcggaaggtgcgggccgagaacgaccggcaccacgccctggacgccgtggtggtggcctgctccaccgtggccatgcagcagaagatcacccggttcgtgcggtacaaggagatgaacgccttcgacggcaagaccatcgacaaggagaccggcgaggtgctgcaccagaagacccacttcccccagccctgggagttcttcgcccaggaggtgatgatccgggtgttcggcaagcccgacggcaagcccgagttcgaggaggccgacaccctggagaagctgcggaccctgctggccgagaagctgtcctcccggcccgaggccgtgcacgagtacgtgacccccctgttcgtgtcccgggcccccaaccggaagatgtccggccagggccacatggagaccgtgaagtccgccaagcggctggacgagggcgtgtccgtgctgcgggtgcccctgacccagctgaagctgaaggacctggagaagatggtgaaccgggagcgggagcccaagctgtacgaggccctgaaggcccggctggaggcccacaaggacgaccccgccaaggccttcgccgagcccttctacaagtacgacaaggccggcaaccggacccagcaggtgaaggccgtgcgggtggagcaggtgcagaagaccggcgtgtgggtgcggaaccacaacggcatcgccgacaacgccaccatggtgcgggtggacgtgttcgagaagggcgacaagtactacctggtgcccatctactcctggcaggtggccaagggcatcctgcccgaccgggccgtggtgcagggcaaggacgaggaggactggcagctgatcgacgactccttcaacttcaagttctccctgcaccccaacgacctggtggaggtgatcaccaagaaggcccggatgttcggctacttcgcctcctgccaccggggcaccggcaacatcaacatccggatccacgacctggaccacaagatcggcaagaacggcatcctggagggcatcggcgtgaagaccgccctgtccttccagaagtaccagatcgacgagctgggcaaggagatccggccctgccggctgaagaagcggccccccgtgcggtccggcaagcggaccgccgacggctccgagttcgagtcccccaagaagaagcggaaggtggagtga

SEQ ID NO: 329 - DNA, 3312 bp, Artificial Sequence
  Synthetic: Nme Cas9 ORF using low A/U codons of Table 4, with start and stop codons
atggccgccttcaagcccaacagcatcaactacatcctgggcctggacatcggcatcgccagcgtgggctgggccatggtggagatcgacgaggaggagaaccccatccggctgatcgacctgggcgtgcgggtgttcgagcgggccgaggtgcccaagaccggcgacagcctggccatggcccggcggctggcccggagcgtgcggcggctgacccggcggcgggcccaccggctgctgcggacccggcggctgctgaagcgggagggcgtgctgcaggccgccaacttcgacgagaacggcctgatcaagagcctgcccaacaccccctggcagctgcgggccgccgccctggaccggaagctgacccccctggagtggagcgccgtgctgctgcacctgatcaagcaccggggctacctgagccagcggaagaacgagggcgagaccgccgacaaggagctgggcgccctgctgaagggcgtggccggcaacgcccacgccctgcagaccggcgacttccggacccccgccgagctggccctgaacaagttcgagaaggagagcggccacatccggaaccagcggagcgactacagccacaccttcagccggaaggacctgcaggccgagctgatcctgctgttcgagaagcagaaggagttcggcaacccccacgtgagcggcggcctgaaggagggcatcgagaccctgctgatgacccagcggcccgccctgagcggcgacgccgtgcagaagatgctgggccactgcaccttcgagcccgccgagcccaaggccgccaagaacacctacaccgccgagcggttcatctggctgaccaagctgaacaacctgcggatcctggagcagggcagcgagcggcccctgaccgacaccgagcgggccaccctgatggacgagccctaccggaagagcaagctgacctacgcccaggcccggaagctgctgggcctggaggacaccgccttcttcaagggcctgcggtacggcaaggacaacgccgaggccagcaccctgatggagatgaaggcctaccacgccatcagccgggccctggagaaggagggcctgaaggacaagaagagccccctgaacctgagccccgagctgcaggacgagatcggcaccgccttcagcctgttcaagaccgacgaggacatcaccggccggctgaaggaccggatccagcccgagatcctggaggccctgctgaagcacatcagcttcgacaagttcgtgcagatcagcctgaaggccctgcggcggatcgtgcccctgatggagcagggcaagcggtacgacgaggcctgcgccgagatctacggcgaccactacggcaagaagaacaccgaggagaagatctacctgccccccatccccgccgacgagatccggaaccccgtggtgctgcgggccctgagccaggcccggaaggtgatcaacggcgtggtgcggcggtacggcagccccgcccggatccacatcgagaccgcccgggaggtgggcaagagcttcaaggaccggaaggagatcgagaagcggcaggaggagaaccggaaggaccgggagaaggccgccgccaagttccgggagtacttccccaacttcgtgggcgagcccaagagcaaggacatcctgaagctgcggctgtacgagcagcagcacggcaagtgcctgtacagcggcaaggagatcaacctgggccggctgaacgagaagggctacgtggagatcgaccacgccctgcccttcagccggacctgggacgacagcttcaacaacaaggtgctggtgctgggcagcgagaaccagaacaagggcaaccagaccccctacgagtacttcaacggcaaggacaacagccgggagtggcaggagttcaaggcccgggtggagaccagccggttcccccggagcaagaagcagcggatcctgctgcagaagttcgacgaggacggcttcaaggagcggaacctgaacgacacccggtacgtgaaccggttcctgtgccagttcgtggccgaccggatgcggctgaccggcaagggcaagaagcgggtgttcgccagcaacggccagatcaccaacctgctgcggggcttctggggcctgcggaaggtgcgggccgagaacgaccggcaccacgccctggacgccgtggtggtggcctgcagcaccgtggccatgcagcagaagatcacccggttcgtgcggtacaaggagatgaacgccttcgacggcaagaccatcgacaaggagaccggcgaggtgctgcaccagaagacccacttcccccagccctgggagttcttcgcccaggaggtgatgatccgggtgttcggcaagcccgacggcaagcccgagttcgaggaggccgacaccctggagaagctgcggaccctgctggccgagaagctgagcagccggcccgaggccgtgcacgagtacgtgacccccctgttcgtgagccgggcccccaaccggaagatgagcggccagggccacatggagaccgtgaagagcgccaagcggctggacgagggcgtgagcgtgctgcgggtgcccctgacccagctgaagctgaaggacctggagaagatggtgaaccgggagcgggagcccaagctgtacgaggccctgaaggcccggctggaggcccacaaggacgaccccgccaaggccttcgccgagcccttctacaagtacgacaaggccggcaaccggacccagcaggtgaaggccgtgcgggtggagcaggtgcagaagaccggcgtgtgggtgcggaaccacaacggcatcgccgacaacgccaccatggtgcgggtggacgtgttcgagaagggcgacaagtactacctggtgcccatctacagctggcaggtggccaagggcatcctgcccgaccgggccgtggtgcagggcaaggacgaggaggactggcagctgatcgacgacagcttcaacttcaagttcagcctgcaccccaacgacctggtggaggtgatcaccaagaaggcccggatgttcggctacttcgccagctgccaccggggcaccggcaacatcaacatccggatccacgacctggaccacaagatcggcaagaacggcatcctggagggcatcggcgtgaagaccgccctgagcttccagaagtaccagatcgacgagctgggcaaggagatccggccctgccggctgaagaagcggccccccgtgcggagcggcaagcggaccgccgacggcagcgagttcgagagccccaagaagaagcggaaggtggagtga

SEQ ID NO: 330 - DNA, 4146 bp, Artificial Sequence
  Synthetic: Open reading frame for Cas9 with NLS1, with start and stop codons
atggacaagaagtacagcatcggactggacatcggaacaaacagcgtcggatgggcagtcatcacagacgaatacaaggtcccgagcaagaagttcaaggtcctgggaaacacagacagacacagcatcaagaagaacctgatcggagcactgctgttcgacagcggagaaacagcagaagcaacaagactgaagagaacagcaagaagaagatacacaagaagaaagaacagaatctgctacctgcaggaaatcttcagcaacgaaatggcaaaggtcgacgacagcttcttccacagactggaagaaagcttcctggtcgaagaagacaagaagcacgaaagacacccgatcttcggaaacatcgtcgacgaagtcgcataccacgaaaagtacccgacaatctaccacctgagaaagaagctggtcgacagcacagacaaggcagacctgagactgatctacctggcactggcacacatgatcaagttcagaggacacttcctgatcgaaggagacctgaacccggacaacagcgacgtcgacaagctgttcatccagctggtccagacatacaaccagctgttcgaagaaaacccgatcaacgcaagcggagtcgacgcaaaggcaatcctgagcgcaagactgagcaagagcagaagactggaaaacctgatcgcacagctgccgggagaaaagaagaacggactgttcggaaacctgatcgcactgagcctgggactgacaccgaacttcaagagcaacttcgacctggcagaagacgcaaagctgcagctgagcaaggacacatacgacgacgacctggacaacctgctggcacagatcggagaccagtacgcagacctgttcctggcagcaaagaacctgagcgacgcaatcctgctgagcgacatcctgagagtcaacacagaaatcacaaaggcaccgctgagcgcaagcatgatcaagagatacgacgaacaccaccaggacctgacactgctgaaggcactggtcagacagcagctgccggaaaagtacaaggaaatcttcttcgaccagagcaagaacggatacgcaggatacatcgacggaggagcaagccaggaagaattctacaagttcatcaagccgatcctggaaaagatggacggaacagaagaactgctggtcaagctgaacagagaagacctgctgagaaagcagagaacattcgacaacggaagcatcccgcaccagatccacctgggagaactgcacgcaatcctgagaagacaggaagacttctacccgttcctgaaggacaacagagaaaagatcgaaaagatcctgacattcagaatcccgtactacgtcggaccgctggcaagaggaaacagcagattcgcatggatgacaagaaagagcgaagaaacaatcacaccgtggaacttcgaagaagtcgtcgacaagggagcaagcgcacagagcttcatcgaaagaatgacaaacttcgacaagaacctgccgaacgaaaaggtcctgccgaagcacagcctgctgtacgaatacttcacagtctacaacgaactgacaaaggtcaagtacgtcacagaaggaatgagaaagccggcattcctgagcggagaacagaagaaggcaatcgtcgacctgctgttcaagacaaacagaaaggtcacagtcaagcagctgaaggaagactacttcaagaagatcgaatgcttcgacagcgtcgaaatcagcggagtcgaagacagattcaacgcaagcctgggaacataccacgacctgctgaagatcatcaaggacaaggacttcctggacaacgaagaaaacgaagacatcctggaagacatcgtcctgacactgacactgttcgaagacagagaaatgatcgaagaaagactgaagacatacgcacacctgttcgacgacaaggtcatgaagcagctgaagagaagaagatacacaggatggggaagactgagcagaaagctgatcaacggaatcagagacaagcagagcggaaagacaatcctggacttcctgaagagcgacggattcgcaaacagaaacttcatgcagctgatccacgacgacagcctgacattcaaggaagacatccagaaggcacaggtcagcggacagggagacagcctgcacgaacacatcgcaaacctggcaggaagcccggcaatcaagaagggaatcctgcagacagtcaaggtcgtcgacgaactggtcaaggtcatgggaagacacaagccggaaaacatcgtcatcgaaatggcaagagaaaaccagacaacacagaagggacagaagaacagcagagaaagaatgaagagaatcgaagaaggaatcaaggaactgggaagccagatcctgaaggaacacccggtcgaaaacacacagctgcagaacgaaaagctgtacctgtactacctgcagaacggaagagacatgtacgtcgaccaggaactggacatcaacagactgagcgactacgacgtcgaccacatcgtcccgcagagcttcctgaaggacgacagcatcgacaacaaggtcctgacaagaagcgacaagaacagaggaaagagcgacaacgtcccgagcgaagaagtcgtcaagaagatgaagaactactggagacagctgctgaacgcaaagctgatcacacagagaaagttcgacaacctgacaaaggcagagagaggaggactgagcgaactggacaaggcaggattcatcaagagacagctggtcgaaacaagacagatcacaaagcacgtcgcacagatcctggacagcagaatgaacacaaagtacgacgaaaacgacaagctgatcagagaagtcaaggtcatcacactgaagagcaagctggtcagcgacttcagaaaggacttccagttctacaaggtcagagaaatcaacaactaccaccacgcacacgacgcatacctgaacgcagtcgtcggaacagcactgatcaagaagtacccgaagctggaaagcgaattcgtctacggagactacaaggtctacgacgtcagaaagatgatcgcaaagagcgaacaggaaatcggaaaggcaacagcaaagtacttcttctacagcaacatcatgaacttcttcaagacagaaatcacactggcaaacggagaaatcagaaagagaccgctgatcgaaacaaacggagaaacaggagaaatcgtctgggacaagggaagagacttcgcaacagtcagaaaggtcctgagcatgccgcaggtcaacatcgtcaagaagacagaagtccagacaggaggattcagcaaggaaagcatcctgccgaagagaaacagcgacaagctgatcgcaagaaagaaggactgggacccgaagaagtacggaggattcgacagcccgacagtcgcatacagcgtcctggtcgtcgcaaaggtcgaaaagggaaagagcaagaagctgaagagcgtcaaggaactgctgggaatcacaatcatggaaagaagcagcttcgaaaagaacccgatcgacttcctggaagcaaagggatacaaggaagtcaagaaggacctgatcatcaagctgccgaagtacagcctgttcgaactggaaaacggaagaaagagaatgctggcaagcgcaggagaactgcagaagggaaacgaactggcactgccgagcaagtacgtcaacttcctgtacctggcaagccactacgaaaagctgaagggaagcccggaagacaacgaacagaagcagctgttcgtcgaacagcacaagcactacctggacgaaatcatcgaacagatcagcgaattcagcaagagagtcatcctggcagacgcaaacctggacaaggtcctgagcgcatacaacaagcacagagacaagccgatcagagaacaggcagaaaacatcatccacctgttcacactgacaaacctgggagcaccggcagcattcaagtacttcgacacaacaatcgacagaaagagatacacaagcacaaaggaagtcctggacgcaacactgatccaccagagcatcacaggactgtacgaaacaagaatcgacctgagccagctgggaggagacggaggaggaagcctggcagcaaagagaagcagaacaacatag

SEQ ID NO: 331 - DNA, 4146 bp, Artificial Sequence
  Synthetic: Open reading frame for Cas9 with NLS2, with start and stop codons
atggacaagaagtacagcatcggactggacatcggaacaaacagcgtcggatgggcagtcatcacagacgaatacaaggtcccgagcaagaagttcaaggtcctgggaaacacagacagacacagcatcaagaagaacctgatcggagcactgctgttcgacagcggagaaacagcagaagcaacaagactgaagagaacagcaagaagaagatacacaagaagaaagaacagaatctgctacctgcaggaaatcttcagcaacgaaatggcaaaggtcgacgacagcttcttccacagactggaagaaagcttcctggtcgaagaagacaagaagcacgaaagacacccgatcttcggaaacatcgtcgacgaagtcgcataccacgaaaagtacccgacaatctaccacctgagaaagaagctggtcgacagcacagacaaggcagacctgagactgatctacctggcactggcacacatgatcaagttcagaggacacttcctgatcgaaggagacctgaacccggacaacagcgacgtcgacaagctgttcatccagctggtccagacatacaaccagctgttcgaagaaaacccgatcaacgcaagcggagtcgacgcaaaggcaatcctgagcgcaagactgagcaagagcagaagactggaaaacctgatcgcacagctgccgggagaaaagaagaacggactgttcggaaacctgatcgcactgagcctgggactgacaccgaacttcaagagcaacttcgacctggcagaagacgcaaagctgcagctgagcaaggacacatacgacgacgacctggacaacctgctggcacagatcggagaccagtacgcagacctgttcctggcagcaaagaacctgagcgacgcaatcctgctgagcgacatcctgagagtcaacacagaaatcacaaaggcaccgctgagcgcaagcatgatcaagagatacgacgaacaccaccaggacctgacactgctgaaggcactggtcagacagcagctgccggaaaagtacaaggaaatcttcttcgaccagagcaagaacggatacgcaggatacatcgacggaggagcaagccaggaagaattctacaagttcatcaagccgatcctggaaaagatggacggaacagaagaactgctggtcaagctgaacagagaagacctgctgagaaagcagagaacattcgacaacggaagcatcccgcaccagatccacctgggagaactgcacgcaatcctgagaagacaggaagacttctacccgttcctgaaggacaacagagaaaagatcgaaaagatcctgacattcagaatcccgtactacgtcggaccgctggcaagaggaaacagcagattcgcatggatgacaagaaagagcgaagaaacaatcacaccgtggaacttcgaagaagtcgtcgacaagggagcaagcgcacagagcttcatcgaaagaatgacaaacttcgacaagaacctgccgaacgaaaaggtcctgccgaagcacagcctgctgtacgaatacttcacagtctacaacgaactgacaaaggtcaagtacgtcacagaaggaatgagaaagccggcattcctgagcggagaacagaagaaggcaatcgtcgacctgctgttcaagacaaacagaaaggtcacagtcaagcagctgaaggaagactacttcaagaagatcgaatgcttcgacagcgtcgaaatcagcggagtcgaagacagattcaacgcaagcctgggaacataccacgacctgctgaagatcatcaaggacaaggacttcctggacaacgaagaaaacgaagacatcctggaagacatcgtcctgacactgacactgttcgaagacagagaaatgatcgaagaaagactgaagacatacgcacacctgttcgacgacaaggtcatgaagcagctgaagagaagaagatacacaggatggggaagactgagcagaaagctgatcaacggaatcagagacaagcagagcggaaagacaatcctggacttcctgaagagcgacggattcgcaaacagaaacttcatgcagctgatccacgacgacagcctgacattcaaggaagacatccagaaggcacaggtcagcggacagggagacagcctgcacgaacacatcgcaaacctggcaggaagcccggcaatcaagaagggaatcctgcagacagtcaaggtcgtcgacgaactggtcaaggtcatgggaagacacaagccggaaaacatcgtcatcgaaatggcaagagaaaaccagacaacacagaagggacagaagaacagcagagaaagaatgaagagaatcgaagaaggaatcaaggaactgggaagccagatcctgaaggaacacccggtcgaaaacacacagctgcagaacgaaaagctgtacctgtactacctgcagaacggaagagacatgtacgtcgaccaggaactggacatcaacagactgagcgactacgacgtcgaccacatcgtcccgcagagcttcctgaaggacgacagcatcgacaacaaggtcctgacaagaagcgacaagaacagaggaaagagcgacaacgtcccgagcgaagaagtcgtcaagaagatgaagaactactggagacagctgctgaacgcaaagctgatcacacagagaaagttcgacaacctgacaaaggcagagagaggaggactgagcgaactggacaaggcaggattcatcaagagacagctggtcgaaacaagacagatcacaaagcacgtcgcacagatcctggacagcagaatgaacacaaagtacgacgaaaacgacaagctgatcagagaagtcaaggtcatcacactgaagagcaagctggtcagcgacttcagaaaggacttccagttctacaaggtcagagaaatcaacaactaccaccacgcacacgacgcatacctgaacgcagtcgtcggaacagcactgatcaagaagtacccgaagctggaaagcgaattcgtctacggagactacaaggtctacgacgtcagaaagatgatcgcaaagagcgaacaggaaatcggaaaggcaacagcaaagtacttcttctacagcaacatcatgaacttcttcaagacagaaatcacactggcaaacggagaaatcagaaagagaccgctgatcgaaacaaacggagaaacaggagaaatcgtctgggacaagggaagagacttcgcaacagtcagaaaggtcctgagcatgccgcaggtcaacatcgtcaagaagacagaagtccagacaggaggattcagcaaggaaagcatcctgccgaagagaaacagcgacaagctgatcgcaagaaagaaggactgggacccgaagaagtacggaggattcgacagcccgacagtcgcatacagcgtcctggtcgtcgcaaaggtcgaaaagggaaagagcaagaagctgaagagcgtcaaggaactgctgggaatcacaatcatggaaagaagcagcttcgaaaagaacccgatcgacttcctggaagcaaagggatacaaggaagtcaagaaggacctgatcatcaagctgccgaagtacagcctgttcgaactggaaaacggaagaaagagaatgctggcaagcgcaggagaactgcagaagggaaacgaactggcactgccgagcaagtacgtcaacttcctgtacctggcaagccactacgaaaagctgaagggaagcccggaagacaacgaacagaagcagctgttcgtcgaacagcacaagcactacctggacgaaatcatcgaacagatcagcgaattcagcaagagagtcatcctggcagacgcaaacctggacaaggtcctgagcgcatacaacaagcacagagacaagccgatcagagaacaggcagaaaacatcatccacctgttcacactgacaaacctgggagcaccggcagcattcaagtacttcgacacaacaatcgacagaaagagatacacaagcacaaaggaagtcctggacgcaacactgatccaccagagcatcacaggactgtacgaaacaagaatcgacctgagccagctgggaggagacggaggaggaagccaggcagcaaagagaagcagaacaacatag

SEQ ID NO: 332 - DNA, 4149 bp, Artificial Sequence
  Synthetic: Open reading frame for Cas9 with NLS3, with start and stop codons
atggacaagaagtacagcatcggactggacatcggaacaaacagcgtcggatgggcagtcatcacagacgaatacaaggtcccgagcaagaagttcaaggtcctgggaaacacagacagacacagcatcaagaagaacctgatcggagcactgctgttcgacagcggagaaacagcagaagcaacaagactgaagagaacagcaagaagaagatacacaagaagaaagaacagaatctgctacctgcaggaaatcttcagcaacgaaatggcaaaggtcgacgacagcttcttccacagactggaagaaagcttcctggtcgaagaagacaagaagcacgaaagacacccgatcttcggaaacatcgtcgacgaagtcgcataccacgaaaagtacccgacaatctaccacctgagaaagaagctggtcgacagcacagacaaggcagacctgagactgatctacctggcactggcacacatgatcaagttcagaggacacttcctgatcgaaggagacctgaacccggacaacagcgacgtcgacaagctgttcatccagctggtccagacatacaaccagctgttcgaagaaaacccgatcaacgcaagcggagtcgacgcaaaggcaatcctgagcgcaagactgagcaagagcagaagactggaaaacctgatcgcacagctgccgggagaaaagaagaacggactgttcggaaacctgatcgcactgagcctgggactgacaccgaacttcaagagcaacttcgacctggcagaagacgcaaagctgcagctgagcaaggacacatacgacgacgacctggacaacctgctggcacagatcggagaccagtacgcagacctgttcctggcagcaaagaacctgagcgacgcaatcctgctgagcgacatcctgagagtcaacacagaaatcacaaaggcaccgctgagcgcaagcatgatcaagagatacgacgaacaccaccaggacctgacactgctgaaggcactggtcagacagcagctgccggaaaagtacaaggaaatcttcttcgaccagagcaagaacggatacgcaggatacatcgacggaggagcaagccaggaagaattctacaagttcatcaagccgatcctggaaaagatggacggaacagaagaactgctggtcaagctgaacagagaagacctgctgagaaagcagagaacattcgacaacggaagcatcccgcaccagatccacctgggagaactgcacgcaatcctgagaagacaggaagacttctacccgttcctgaaggacaacagagaaaagatcgaaaagatcctgacattcagaatcccgtactacgtcggaccgctggcaagaggaaacagcagattcgcatggatgacaagaaagagcgaagaaacaatcacaccgtggaacttcgaagaagtcgtcgacaagggagcaagcgcacagagcttcatcgaaagaatgacaaacttcgacaagaacctgccgaacgaaaaggtcctgccgaagcacagcctgctgtacgaatacttcacagtctacaacgaactgacaaaggtcaagtacgtcacagaaggaatgagaaagccggcattcctgagcggagaacagaagaaggcaatcgtcgacctgctgttcaagacaaacagaaaggtcacagtcaagcagctgaaggaagactacttcaagaagatcgaatgcttcgacagcgtcgaaatcagcggagtcgaagacagattcaacgcaagcctgggaacataccacgacctgctgaagatcatcaaggacaaggacttcctggacaacgaagaaaacgaagacatcctggaagacatcgtcctgacactgacactgttcgaagacagagaaatgatcgaagaaagactgaagacatacgcacacctgttcgacgacaaggtcatgaagcagctgaagagaagaagatacacaggatggggaagactgagcagaaagctgatcaacggaatcagagacaagcagagcggaaagacaatcctggacttcctgaagagcgacggattcgcaaacagaaacttcatgcagctgatccacgacgacagcctgacattcaaggaagacatccagaaggcacaggtcagcggacagggagacagcctgcacgaacacatcgcaaacctggcaggaagcccggcaatcaagaagggaatcctgcagacagtcaaggtcgtcgacgaactggtcaaggtcatgggaagacacaagccggaaaacatcgtcatcgaaatggcaagagaaaaccagacaacacagaagggacagaagaacagcagagaaagaatgaagagaatcgaagaaggaatcaaggaactgggaagccagatcctgaaggaacacccggtcgaaaacacacagctgcagaacgaaaagctgtacctgtactacctgcagaacggaagagacatgtacgtcgaccaggaactggacatcaacagactgagcgactacgacgtcgaccacatcgtcccgcagagcttcctgaaggacgacagcatcgacaacaaggtcctgacaagaagcgacaagaacagaggaaagagcgacaacgtcccgagcgaagaagtcgtcaagaagatgaagaactactggagacagctgctgaacgcaaagctgatcacacagagaaagttcgacaacctgacaaaggcagagagaggaggactgagcgaactggacaaggcaggattcatcaagagacagctggtcgaaacaagacagatcacaaagcacgtcgcacagatcctggacagcagaatgaacacaaagtacgacgaaaacgacaagctgatcagagaagtcaaggtcatcacactgaagagcaagctggtcagcgacttcagaaaggacttccagttctacaaggtcagagaaatcaacaactaccaccacgcacacgacgcatacctgaacgcagtcgtcggaacagcactgatcaagaagtacccgaagctggaaagcgaattcgtctacggagactacaaggtctacgacgtcagaaagatgatcgcaaagagcgaacaggaaatcggaaaggcaacagcaaagtacttcttctacagcaacatcatgaacttcttcaagacagaaatcacactggcaaacggagaaatcagaaagagaccgctgatcgaaacaaacggagaaacaggagaaatcgtctgggacaagggaagagacttcgcaacagtcagaaaggtcctgagcatgccgcaggtcaacatcgtcaagaagacagaagtccagacaggaggattcagcaaggaaagcatcctgccgaagagaaacagcgacaagctgatcgcaagaaagaaggactgggacccgaagaagtacggaggattcgacagcccgacagtcgcatacagcgtcctggtcgtcgcaaaggtcgaaaagggaaagagcaagaagctgaagagcgtcaaggaactgctgggaatcacaatcatggaaagaagcagcttcgaaaagaacccgatcgacttcctggaagcaaagggatacaaggaagtcaagaaggacctgatcatcaagctgccgaagtacagcctgttcgaactggaaaacggaagaaagagaatgctggcaagcgcaggagaactgcagaagggaaacgaactggcactgccgagcaagtacgtcaacttcctgtacctggcaagccactacgaaaagctgaagggaagcccggaagacaacgaacagaagcagctgttcgtcgaacagcacaagcactacctggacgaaatcatcgaacagatcagcgaattcagcaagagagtcatcctggcagacgcaaacctggacaaggtcctgagcgcatacaacaagcacagagacaagccgatcagagaacaggcagaaaacatcatccacctgttcacactgacaaacctgggagcaccggcagcattcaagtacttcgacacaacaatcgacagaaagagatacacaagcacaaaggaagtcctggacgcaacactgatccaccagagcatcacaggactgtacgaaacaagaatcgacctgagccagctgggaggagacggaggaggaagcccggcaccggcaaagagagaaagaacaacatag

SEQ ID NO: 333 - DNA, 4146 bp, Artificial Sequence
  Synthetic: Open reading frame for Cas9 with NLS4, with start and stop codons
atggacaagaagtacagcatcggactggacatcggaacaaacagcgtcggatgggcagtcatcacagacgaatacaaggtcccgagcaagaagttcaaggtcctgggaaacacagacagacacagcatcaagaagaacctgatcggagcactgctgttcgacagcggagaaacagcagaagcaacaagactgaagagaacagcaagaagaagatacacaagaagaaagaacagaatctgctacctgcaggaaatcttcagcaacgaaatggcaaaggtcgacgacagcttcttccacagactggaagaaagcttcctggtcgaagaagacaagaagcacgaaagacacccgatcttcggaaacatcgtcgacgaagtcgcataccacgaaaagtacccgacaatctaccacctgagaaagaagctggtcgacagcacagacaaggcagacctgagactgatctacctggcactggcacacatgatcaagttcagaggacacttcctgatcgaaggagacctgaacccggacaacagcgacgtcgacaagctgttcatccagctggtccagacatacaaccagctgttcgaagaaaacccgatcaacgcaagcggagtcgacgcaaaggcaatcctgagcgcaagactgagcaagagcagaagactggaaaacctgatcgcacagctgccgggagaaaagaagaacggactgttcggaaacctgatcgcactgagcctgggactgacaccgaacttcaagagcaacttcgacctggcagaagacgcaaagctgcagctgagcaaggacacatacgacgacgacctggacaacctgctggcacagatcggagaccagtacgcagacctgttcctggcagcaaagaacctgagcgacgcaatcctgctgagcgacatcctgagagtcaacacagaaatcacaaaggcaccgctgagcgcaagcatgatcaagagatacgacgaacaccaccaggacctgacactgctgaaggcactggtcagacagcagctgccggaaaagtacaaggaaatcttcttcgaccagagcaagaacggatacgcaggatacatcgacggaggagcaagccaggaagaattctacaagttcatcaagccgatcctggaaaagatggacggaacagaagaactgctggtcaagctgaacagagaagacctgctgagaaagcagagaacattcgacaacggaagcatcccgcaccagatccacctgggagaactgcacgcaatcctgagaagacaggaagacttctacccgttcctgaaggacaacagagaaaagatcgaaaagatcctgacattcagaatcccgtactacgtcggaccgctggcaagaggaaacagcagattcgcatggatgacaagaaagagcgaagaaacaatcacaccgtggaacttcgaagaagtcgtcgacaagggagcaagcgcacagagcttcatcgaaagaatgacaaacttcgacaagaacctgccgaacgaaaaggtcctgccgaagcacagcctgctgtacgaatacttcacagtctacaacgaactgacaaaggtcaagtacgtcacagaaggaatgagaaagccggcattcctgagcggagaacagaagaaggcaatcgtcgacctgctgttcaagacaaacagaaaggtcacagtcaagcagctgaaggaagactacttcaagaagatcgaatgcttcgacagcgtcgaaatcagcggagtcgaagacagattcaacgcaagcctgggaacataccacgacctgctgaagatcatcaaggacaaggacttcctggacaacgaagaaaacgaagacatcctggaagacatcgtcctgacactgacactgttcgaagacagagaaatgatcgaagaaagactgaagacatacgcacacctgttcgacgacaaggtcatgaagcagctgaagagaagaagatacacaggatggggaagactgagcagaaagctgatcaacggaatcagagacaagcagagcggaaagacaatcctggacttcctgaagagcgacggattcgcaaacagaaacttcatgcagctgatccacgacgacagcctgacattcaaggaagacatccagaaggcacaggtcagcggacagggagacagcctgcacgaacacatcgcaaacctggcaggaagcccggcaatcaagaagggaatcctgcagacagtcaaggtcgtcgacgaactggtcaaggtcatgggaagacacaagccggaaaacatcgtcatcgaaatggcaagagaaaaccagacaacacagaagggacagaagaacagcagagaaagaatgaagagaatcgaagaaggaatcaaggaactgggaagccagatcctgaaggaacacccggtcgaaaacacacagctgcagaacgaaaagctgtacctgtactacctgcagaacggaagagacatgtacgtcgaccaggaactggacatcaacagactgagcgactacgacgtcgaccacatcgtcccgcagagcttcctgaaggacgacagcatcgacaacaaggtcctgacaagaagcgacaagaacagaggaaagagcgacaacgtcccgagcgaagaagtcgtcaagaagatgaagaactactggagacagctgctgaacgcaaagctgatcacacagagaaagttcgacaacctgacaaaggcagagagaggaggactgagcgaactggacaaggcaggattcatcaagagacagctggtcgaaacaagacagatcacaaagcacgtcgcacagatcctggacagcagaatgaacacaaagtacgacgaaaacgacaagctgatcagagaagtcaaggtcatcacactgaagagcaagctggtcagcgacttcagaaaggacttccagttctacaaggtcagagaaatcaacaactaccaccacgcacacgacgcatacctgaacgcagtcgtcggaacagcactgatcaagaagtacccgaagctggaaagcgaattcgtctacggagactacaaggtctacgacgtcagaaagatgatcgcaaagagcgaacaggaaatcggaaaggcaacagcaaagtacttcttctacagcaacatcatgaacttcttcaagacagaaatcacactggcaaacggagaaatcagaaagagaccgctgatcgaaacaaacggagaaacaggagaaatcgtctgggacaagggaagagacttcgcaacagtcagaaaggtcctgagcatgccgcaggtcaacatcgtcaagaagacagaagtccagacaggaggattcagcaaggaaagcatcctgccgaagagaaacagcgacaagctgatcgcaagaaagaaggactgggacccgaagaagtacggaggattcgacagcccgacagtcgcatacagcgtcctggtcgtcgcaaaggtcgaaaagggaaagagcaagaagctgaagagcgtcaaggaactgctgggaatcacaatcatggaaagaagcagcttcgaaaagaacccgatcgacttcctggaagcaaagggatacaaggaagtcaagaaggacctgatcatcaagctgccgaagtacagcctgttcgaactggaaaacggaagaaagagaatgctggcaagcgcaggagaactgcagaagggaaacgaactggcactgccgagcaagtacgtcaacttcctgtacctggcaagccactacgaaaagctgaagggaagcccggaagacaacgaacagaagcagctgttcgtcgaacagcacaagcactacctggacgaaatcatcgaacagatcagcgaattcagcaagagagtcatcctggcagacgcaaacctggacaaggtcctgagcgcatacaacaagcacagagacaagccgatcagagaacaggcagaaaacatcatccacctgttcacactgacaaacctgggagcaccggcagcattcaagtacttcgacacaacaatcgacagaaagagatacacaagcacaaaggaagtcctggacgcaacactgatccaccagagcatcacaggactgtacgaaacaagaatcgacctgagccagctgggaggagacggaggaggaagccaggcagcaaagagaccgagaacaacatag

SEQ ID NO: 334 - DNA, 4146 bp, Artificial Sequence
  Synthetic: Open reading frame for Cas9 with NLS5, with start and stop codons
atggacaagaagtacagcatcggactggacatcggaacaaacagcgtcggatgggcagtcatcacagacgaatacaaggtcccgagcaagaagttcaaggtcctgggaaacacagacagacacagcatcaagaagaacctgatcggagcactgctgttcgacagcggagaaacagcagaagcaacaagactgaagagaacagcaagaagaagatacacaagaagaaagaacagaatctgctacctgcaggaaatcttcagcaacgaaatggcaaaggtcgacgacagcttcttccacagactggaagaaagcttcctggtcgaagaagacaagaagcacgaaagacacccgatcttcggaaacatcgtcgacgaagtcgcataccacgaaaagtacccgacaatctaccacctgagaaagaagctggtcgacagcacagacaaggcagacctgagactgatctacctggcactggcacacatgatcaagttcagaggacacttcctgatcgaaggagacctgaacccggacaacagcgacgtcgacaagctgttcatccagctggtccagacatacaaccagctgttcgaagaaaacccgatcaacgcaagcggagtcgacgcaaaggcaatcctgagcgcaagactgagcaagagcagaagactggaaaacctgatcgcacagctgccgggagaaaagaagaacggactgttcggaaacctgatcgcactgagcctgggactgacaccgaacttcaagagcaacttcgacctggcagaagacgcaaagctgcagctgagcaaggacacatacgacgacgacctggacaacctgctggcacagatcggagaccagtacgcagacctgttcctggcagcaaagaacctgagcgacgcaatcctgctgagcgacatcctgagagtcaacacagaaatcacaaaggcaccgctgagcgcaagcatgatcaagagatacgacgaacaccaccaggacctgacactgctgaaggcactggtcagacagcagctgccggaaaagtacaaggaaatcttcttcgaccagagcaagaacggatacgcaggatacatcgacggaggagcaagccaggaagaattctacaagttcatcaagccgatcctggaaaagatggacggaacagaagaactgctggtcaagctgaacagagaagacctgctgagaaagcagagaacattcgacaacggaagcatcccgcaccagatccacctgggagaactgcacgcaatcctgagaagacaggaagacttctacccgttcctgaaggacaacagagaaaagatcgaaaagatcctgacattcagaatcccgtactacgtcggaccgctggcaagaggaaacagcagattcgcatggatgacaagaaagagcgaagaaacaatcacaccgtggaacttcgaagaagtcgtcgacaagggagcaagcgcacagagcttcatcgaaagaatgacaaacttcgacaagaacctgccgaacgaaaaggtcctgccgaagcacagcctgctgtacgaatacttcacagtctacaacgaactgacaaaggtcaagtacgtcacagaaggaatgagaaagccggcattcctgagcggagaacagaagaaggcaatcgtcgacctgctgttcaagacaaacagaaaggtcacagtcaagcagctgaaggaagactacttcaagaagatcgaatgcttcgacagcgtcgaaatcagcggagtcgaagacagattcaacgcaagcctgggaacataccacgacctgctgaagatcatcaaggacaaggacttcctggacaacgaagaaaacgaagacatcctggaagacatcgtcctgacactgacactgttcgaagacagagaaatgatcgaagaaagactgaagacatacgcacacctgttcgacgacaaggtcatgaagcagctgaagagaagaagatacacaggatggggaagactgagcagaaagctgatcaacggaatcagagacaagcagagcggaaagacaatcctggacttcctgaagagcgacggattcgcaaacagaaacttcatgcagctgatccacgacgacagcctgacattcaaggaagacatccagaaggcacaggtcagcggacagggagacagcctgcacgaacacatcgcaaacctggcaggaagcccggcaatcaagaagggaatcctgcagacagtcaaggtcgtcgacgaactggtcaaggtcatgggaagacacaagccggaaaacatcgtcatcgaaatggcaagagaaaaccagacaacacagaagggacagaagaacagcagagaaagaatgaagagaatcgaagaaggaatcaaggaactgggaagccagatcctgaaggaacacccggtcgaaaacacacagctgcagaacgaaaagctgtacctgtactacctgcagaacggaagagacatgtacgtcgaccaggaactggacatcaacagactgagcgactacgacgtcgaccacatcgtcccgcagagcttcctgaaggacgacagcatcgacaacaaggtcctgacaagaagcgacaagaacagaggaaagagcgacaacgtcccgagcgaagaagtcgtcaagaagatgaagaactactggagacagctgctgaacgcaaagctgatcacacagagaaagttcgacaacctgacaaaggcagagagaggaggactgagcgaactggacaaggcaggattcatcaagagacagctggtcgaaacaagacagatcacaaagcacgtcgcacagatcctggacagcagaatgaacacaaagtacgacgaaaacgacaagctgatcagagaagtcaaggtcatcacactgaagagcaagctggtcagcgacttcagaaaggacttccagttctacaaggtcagagaaatcaacaactaccaccacgcacacgacgcatacctgaacgcagtcgtcggaacagcactgatcaagaagtacccgaagctggaaagcgaattcgtctacggagactacaaggtctacgacgtcagaaagatgatcgcaaagagcgaacaggaaatcggaaaggcaacagcaaagtacttcttctacagcaacatcatgaacttcttcaagacagaaatcacactggcaaacggagaaatcagaaagagaccgctgatcgaaacaaacggagaaacaggagaaatcgtctgggacaagggaagagacttcgcaacagtcagaaaggtcctgagcatgccgcaggtcaacatcgtcaagaagacagaagtccagacaggaggattcagcaaggaaagcatcctgccgaagagaaacagcgacaagctgatcgcaagaaagaaggactgggacccgaagaagtacggaggattcgacagcccgacagtcgcatacagcgtcctggtcgtcgcaaaggtcgaaaagggaaagagcaagaagctgaagagcgtcaaggaactgctgggaatcacaatcatggaaagaagcagcttcgaaaagaacccgatcgacttcctggaagcaaagggatacaaggaagtcaagaaggacctgatcatcaagctgccgaagtacagcctgttcgaactggaaaacggaagaaagagaatgctggcaagcgcaggagaactgcagaagggaaacgaactggcactgccgagcaagtacgtcaacttcctgtacctggcaagccactacgaaaagctgaagggaagcccggaagacaacgaacagaagcagctgttcgtcgaacagcacaagcactacctggacgaaatcatcgaacagatcagcgaattcagcaagagagtcatcctggcagacgcaaacctggacaaggtcctgagcgcatacaacaagcacagagacaagccgatcagagaacaggcagaaaacatcatccacctgttcacactgacaaacctgggagcaccggcagcattcaagtacttcgacacaacaatcgacagaaagagatacacaagcacaaaggaagtcctggacgcaacactgatccaccagagcatcacaggactgtacgaaacaagaatcgacctgagccagctgggaggagacggaggaggaagcagagcagcaaagagaccgagaacaacatag

SEQ ID NO: 335 - DNA, 4152 bp, Artificial Sequence
  Synthetic: Open reading frame for Cas9 with NLS6, with start and stop codons
atggacaagaagtacagcatcggactggacatcggaacaaacagcgtcggatgggcagtcatcacagacgaatacaaggtcccgagcaagaagttcaaggtcctgggaaacacagacagacacagcatcaagaagaacctgatcggagcactgctgttcgacagcggagaaacagcagaagcaacaagactgaagagaacagcaagaagaagatacacaagaagaaagaacagaatctgctacctgcaggaaatcttcagcaacgaaatggcaaaggtcgacgacagcttcttccacagactggaagaaagcttcctggtcgaagaagacaagaagcacgaaagacacccgatcttcggaaacatcgtcgacgaagtcgcataccacgaaaagtacccgacaatctaccacctgagaaagaagctggtcgacagcacagacaaggcagacctgagactgatctacctggcactggcacacatgatcaagttcagaggacacttcctgatcgaaggagacctgaacccggacaacagcgacgtcgacaagctgttcatccagctggtccagacatacaaccagctgttcgaagaaaacccgatcaacgcaagcggagtcgacgcaaaggcaatcctgagcgcaagactgagcaagagcagaagactggaaaacctgatcgcacagctgccgggagaaaagaagaacggactgttcggaaacctgatcgcactgagcctgggactgacaccgaacttcaagagcaacttcgacctggcagaagacgcaaagctgcagctgagcaaggacacatacgacgacgacctggacaacctgctggcacagatcggagaccagtacgcagacctgttcctggcagcaaagaacctgagcgacgcaatcctgctgagcgacatcctgagagtcaacacagaaatcacaaaggcaccgctgagcgcaagcatgatcaagagatacgacgaacaccaccaggacctgacactgctgaaggcactggtcagacagcagctgccggaaaagtacaaggaaatcttcttcgaccagagcaagaacggatacgcaggatacatcgacggaggagcaagccaggaagaattctacaagttcatcaagccgatcctggaaaagatggacggaacagaagaactgctggtcaagctgaacagagaagacctgctgagaaagcagagaacattcgacaacggaagcatcccgcaccagatccacctgggagaactgcacgcaatcctgagaagacaggaagacttctacccgttcctgaaggacaacagagaaaagatcgaaaagatcctgacattcagaatcccgtactacgtcggaccgctggcaagaggaaacagcagattcgcatggatgacaagaaagagcgaagaaacaatcacaccgtggaacttcgaagaagtcgtcgacaagggagcaagcgcacagagcttcatcgaaagaatgacaaacttcgacaagaacctgccgaacgaaaaggtcctgccgaagcacagcctgctgtacgaatacttcacagtctacaacgaactgacaaaggtcaagtacgtcacagaaggaatgagaaagccggcattcctgagcggagaacagaagaaggcaatcgtcgacctgctgttcaagacaaacagaaaggtcacagtcaagcagctgaaggaagactacttcaagaagatcgaatgcttcgacagcgtcgaaatcagcggagtcgaagacagattcaacgcaagcctgggaacataccacgacctgctgaagatcatcaaggacaaggacttcctggacaacgaagaaaacgaagacatcctggaagacatcgtcctgacactgacactgttcgaagacagagaaatgatcgaagaaagactgaagacatacgcacacctgttcgacgacaaggtcatgaagcagctgaagagaagaagatacacaggatggggaagactgagcagaaagctgatcaacggaatcagagacaagcagagcggaaagacaatcctggacttcctgaagagcgacggattcgcaaacagaaacttcatgcagctgatccacgacgacagcctgacattcaaggaagacatccagaaggcacaggtcagcggacagggagacagcctgcacgaacacatcgcaaacctggcaggaagcccggcaatcaagaagggaatcctgcagacagtcaaggtcgtcgacgaactggtcaaggtcatgggaagacacaagccggaaaacatcgtcatcgaaatggcaagagaaaaccagacaacacagaagggacagaagaacagcagagaaagaatgaagagaatcgaagaaggaatcaaggaactgggaagccagatcctgaaggaacacccggtcgaaaacacacagctgcagaacgaaaagctgtacctgtactacctgcagaacggaagagacatgtacgtcgaccaggaactggacatcaacagactgagcgactacgacgtcgaccacatcgtcccgcagagcttcctgaaggacgacagcatcgacaacaaggtcctgacaagaagcgacaagaacagaggaaagagcgacaacgtcccgagcgaagaagtcgtcaagaagatgaagaactactggagacagctgctgaacgcaaagctgatcacacagagaaagttcgacaacctgacaaaggcagagagaggaggactgagcgaactggacaaggcaggattcatcaagagacagctggtcgaaacaagacagatcacaaagcacgtcgcacagatcctggacagcagaatgaacacaaagtacgacgaaaacgacaagctgatcagagaagtcaaggtcatcacactgaagagcaagctggtcagcgacttcagaaaggacttccagttctacaaggtcagagaaatcaacaactaccaccacgcacacgacgcatacctgaacgcagtcgtcggaacagcactgatcaagaagtacccgaagctggaaagcgaattcgtctacggagactacaaggtctacgacgtcagaaagatgatcgcaaagagcgaacaggaaatcggaaaggcaacagcaaagtacttcttctacagcaacatcatgaacttcttcaagacagaaatcacactggcaaacggagaaatcagaaagagaccgctgatcgaaacaaacggagaaacaggagaaatcgtctgggacaagggaagagacttcgcaacagtcagaaaggtcctgagcatgccgcaggtcaacatcgtcaagaagacagaagtccagacaggaggattcagcaaggaaagcatcctgccgaagagaaacagcgacaagctgatcgcaagaaagaaggactgggacccgaagaagtacggaggattcgacagcccgacagtcgcatacagcgtcctggtcgtcgcaaaggtcgaaaagggaaagagcaagaagctgaagagcgtcaaggaactgctgggaatcacaatcatggaaagaagcagcttcgaaaagaacccgatcgacttcctggaagcaaagggatacaaggaagtcaagaaggacctgatcatcaagctgccgaagtacagcctgttcgaactggaaaacggaagaaagagaatgctggcaagcgcaggagaactgcagaagggaaacgaactggcactgccgagcaagtacgtcaacttcctgtacctggcaagccactacgaaaagctgaagggaagcccggaagacaacgaacagaagcagctgttcgtcgaacagcacaagcactacctggacgaaatcatcgaacagatcagcgaattcagcaagagagtcatcctggcagacgcaaacctggacaaggtcctgagcgcatacaacaagcacagagacaagccgatcagagaacaggcagaaaacatcatccacctgttcacactgacaaacctgggagcaccggcagcattcaagtacttcgacacaacaatcgacagaaagagatacacaagcacaaaggaagtcctggacgcaacactgatccaccagagcatcacaggactgtacgaaacaagaatcgacctgagccagctgggaggagacggaggaggaagcgcagcagcaaagagaagctggagcatggcagcatag

SEQ ID NO: 336 - DNA, 4152 bp, Artificial Sequence
  Synthetic: Open reading frame for Cas9 with NLS7, with start and stop codons
atggacaagaagtacagcatcggactggacatcggaacaaacagcgtcggatgggcagtcatcacagacgaatacaaggtcccgagcaagaagttcaaggtcctgggaaacacagacagacacagcatcaagaagaacctgatcggagcactgctgttcgacagcggagaaacagcagaagcaacaagactgaagagaacagcaagaagaagatacacaagaagaaagaacagaatctgctacctgcaggaaatcttcagcaacgaaatggcaaaggtcgacgacagcttcttccacagactggaagaaagcttcctggtcgaagaagacaagaagcacgaaagacacccgatcttcggaaacatcgtcgacgaagtcgcataccacgaaaagtacccgacaatctaccacctgagaaagaagctggtcgacagcacagacaaggcagacctgagactgatctacctggcactggcacacatgatcaagttcagaggacacttcctgatcgaaggagacctgaacccggacaacagcgacgtcgacaagctgttcatccagctggtccagacatacaaccagctgttcgaagaaaacccgatcaacgcaagcggagtcgacgcaaaggcaatcctgagcgcaagactgagcaagagcagaagactggaaaacctgatcgcacagctgccgggagaaaagaagaacggactgttcggaaacctgatcgcactgagcctgggactgacaccgaacttcaagagcaacttcgacctggcagaagacgcaaagctgcagctgagcaaggacacatacgacgacgacctggacaacctgctggcacagatcggagaccagtacgcagacctgttcctggcagcaaagaacctgagcgacgcaatcctgctgagcgacatcctgagagtcaacacagaaatcacaaaggcaccgctgagcgcaagcatgatcaagagatacgacgaacaccaccaggacctgacactgctgaaggcactggtcagacagcagctgccggaaaagtacaaggaaatcttcttcgaccagagcaagaacggatacgcaggatacatcgacggaggagcaagccaggaagaattctacaagttcatcaagccgatcctggaaaagatggacggaacagaagaactgctggtcaagctgaacagagaagacctgctgagaaagcagagaacattcgacaacggaagcatcccgcaccagatccacctgggagaactgcacgcaatcctgagaagacaggaagacttctacccgttcctgaaggacaacagagaaaagatcgaaaagatcctgacattcagaatcccgtactacgtcggaccgctggcaagaggaaacagcagattcgcatggatgacaagaaagagcgaagaaacaatcacaccgtggaacttcgaagaagtcgtcgacaagggagcaagcgcacagagcttcatcgaaagaatgacaaacttcgacaagaacctgccgaacgaaaaggtcctgccgaagcacagcctgctgtacgaatacttcacagtctacaacgaactgacaaaggtcaagtacgtcacagaaggaatgagaaagccggcattcctgagcggagaacagaagaaggcaatcgtcgacctgctgttcaagacaaacagaaaggtcacagtcaagcagctgaaggaagactacttcaagaagatcgaatgcttcgacagcgtcgaaatcagcggagtcgaagacagattcaacgcaagcctgggaacataccacgacctgctgaagatcatcaaggacaaggacttcctggacaacgaagaaaacgaagacatcctggaagacatcgtcctgacactgacactgttcgaagacagagaaatgatcgaagaaagactgaagacatacgcacacctgttcgacgacaaggtcatgaagcagctgaagagaagaagatacacaggatggggaagactgagcagaaagctgatcaacggaatcagagacaagcagagcggaaagacaatcctggacttcctgaagagcgacggattcgcaaacagaaacttcatgcagctgatccacgacgacagcctgacattcaaggaagacatccagaaggcacaggtcagcggacagggagacagcctgcacgaacacatcgcaaacctggcaggaagcccggcaatcaagaagggaatcctgcagacagtcaaggtcgtcgacgaactggtcaaggtcatgggaagacacaagccggaaaacatcgtcatcgaaatggcaagagaaaaccagacaacacagaagggacagaagaacagcagagaaagaatgaagagaatcgaagaaggaatcaaggaactgggaagccagatcctgaaggaacacccggtcgaaaacacacagctgcagaacgaaaagctgtacctgtactacctgcagaacggaagagacatgtacgtcgaccaggaactggacatcaacagactgagcgactacgacgtcgaccacatcgtcccgcagagcttcctgaaggacgacagcatcgacaacaaggtcctgacaagaagcgacaagaacagaggaaagagcgacaacgtcccgagcgaagaagtcgtcaagaagatgaagaactactggagacagctgctgaacgcaaagctgatcacacagagaaagttcgacaacctgacaaaggcagagagaggaggactgagcgaactggacaaggcaggattcatcaagagacagctggtcgaaacaagacagatcacaaagcacgtcgcacagatcctggacagcagaatgaacacaaagtacgacgaaaacgacaagctgatcagagaagtcaaggtcatcacactgaagagcaagctggtcagcgacttcagaaaggacttccagttctacaaggtcagagaaatcaacaactaccaccacgcacacgacgcatacctgaacgcagtcgtcggaacagcactgatcaagaagtacccgaagctggaaagcgaattcgtctacggagactacaaggtctacgacgtcagaaagatgatcgcaaagagcgaacaggaaatcggaaaggcaacagcaaagtacttcttctacagcaacatcatgaacttcttcaagacagaaatcacactggcaaacggagaaatcagaaagagaccgctgatcgaaacaaacggagaaacaggagaaatcgtctgggacaagggaagagacttcgcaacagtcagaaaggtcctgagcatgccgcaggtcaacatcgtcaagaagacagaagtccagacaggaggattcagcaaggaaagcatcctgccgaagagaaacagcgacaagctgatcgcaagaaagaaggactgggacccgaagaagtacggaggattcgacagcccgacagtcgcatacagcgtcctggtcgtcgcaaaggtcgaaaagggaaagagcaagaagctgaagagcgtcaaggaactgctgggaatcacaatcatggaaagaagcagcttcgaaaagaacccgatcgacttcctggaagcaaagggatacaaggaagtcaagaaggacctgatcatcaagctgccgaagtacagcctgttcgaactggaaaacggaagaaagagaatgctggcaagcgcaggagaactgcagaagggaaacgaactggcactgccgagcaagtacgtcaacttcctgtacctggcaagccactacgaaaagctgaagggaagcccggaagacaacgaacagaagcagctgttcgtcgaacagcacaagcactacctggacgaaatcatcgaacagatcagcgaattcagcaagagagtcatcctggcagacgcaaacctggacaaggtcctgagcgcatacaacaagcacagagacaagccgatcagagaacaggcagaaaacatcatccacctgttcacactgacaaacctgggagcaccggcagcattcaagtacttcgacacaacaatcgacagaaagagatacacaagcacaaaggaagtcctggacgcaacactgatccaccagagcatcacaggactgtacgaaacaagaatcgacctgagccagctgggaggagacggaggaggaagcgcagcagcaaagagagtctggagcatggcattctag

SEQ ID NO: 337 - DNA, 4152 bp, Artificial Sequence
  Synthetic: Open reading frame for Cas9 with NLS8, with start and stop codons
atggacaagaagtacagcatcggactggacatcggaacaaacagcgtcggatgggcagtcatcacagacgaatacaaggtcccgagcaagaagttcaaggtcctgggaaacacagacagacacagcatcaagaagaacctgatcggagcactgctgttcgacagcggagaaacagcagaagcaacaagactgaagagaacagcaagaagaagatacacaagaagaaagaacagaatctgctacctgcaggaaatcttcagcaacgaaatggcaaaggtcgacgacagcttcttccacagactggaagaaagcttcctggtcgaagaagacaagaagcacgaaagacacccgatcttcggaaacatcgtcgacgaagtcgcataccacgaaaagtacccgacaatctaccacctgagaaagaagctggtcgacagcacagacaaggcagacctgagactgatctacctggcactggcacacatgatcaagttcagaggacacttcctgatcgaaggagacctgaacccggacaacagcgacgtcgacaagctgttcatccagctggtccagacatacaaccagctgttcgaagaaaacccgatcaacgcaagcggagtcgacgcaaaggcaatcctgagcgcaagactgagcaagagcagaagactggaaaacctgatcgcacagctgccgggagaaaagaagaacggactgttcggaaacctgatcgcactgagcctgggactgacaccgaacttcaagagcaacttcgacctggcagaagacgcaaagctgcagctgagcaaggacacatacgacgacgacctggacaacctgctggcacagatcggagaccagtacgcagacctgttcctggcagcaaagaacctgagcgacgcaatcctgctgagcgacatcctgagagtcaacacagaaatcacaaaggcaccgctgagcgcaagcatgatcaagagatacgacgaacaccaccaggacctgacactgctgaaggcactggtcagacagcagctgccggaaaagtacaaggaaatcttcttcgaccagagcaagaacggatacgcaggatacatcgacggaggagcaagccaggaagaattctacaagttcatcaagccgatcctggaaaagatggacggaacagaagaactgctggtcaagctgaacagagaagacctgctgagaaagcagagaacattcgacaacggaagcatcccgcaccagatccacctgggagaactgcacgcaatcctgagaagacaggaagacttctacccgttcctgaaggacaacagagaaaagatcgaaaagatcctgacattcagaatcccgtactacgtcggaccgctggcaagaggaaacagcagattcgcatggatgacaagaaagagcgaagaaacaatcacaccgtggaacttcgaagaagtcgtcgacaagggagcaagcgcacagagcttcatcgaaagaatgacaaacttcgacaagaacctgccgaacgaaaaggtcctgccgaagcacagcctgctgtacgaatacttcacagtctacaacgaactgacaaaggtcaagtacgtcacagaaggaatgagaaagccggcattcctgagcggagaacagaagaaggcaatcgtcgacctgctgttcaagacaaacagaaaggtcacagtcaagcagctgaaggaagactacttcaagaagatcgaatgcttcgacagcgtcgaaatcagcggagtcgaagacagattcaacgcaagcctgggaacataccacgacctgctgaagatcatcaaggacaaggacttcctggacaacgaagaaaacgaagacatcctggaagacatcgtcctgacactgacactgttcgaagacagagaaatgatcgaagaaagactgaagacatacgcacacctgttcgacgacaaggtcatgaagcagctgaagagaagaagatacacaggatggggaagactgagcagaaagctgatcaacggaatcagagacaagcagagcggaaagacaatcctggacttcctgaagagcgacggattcgcaaacagaaacttcatgcagctgatccacgacgacagcctgacattcaaggaagacatccagaaggcacaggtcagcggacagggagacagcctgcacgaacacatcgcaaacctggcaggaagcccggcaatcaagaagggaatcctgcagacagtcaaggtcgtcgacgaactggtcaaggtcatgggaagacacaagccggaaaacatcgtcatcgaaatggcaagagaaaaccagacaacacagaagggacagaagaacagcagagaaagaatgaagagaatcgaagaaggaatcaaggaactgggaagccagatcctgaaggaacacccggtcgaaaacacacagctgcagaacgaaaagctgtacctgtactacctgcagaacggaagagacatgtacgtcgaccaggaactggacatcaacagactgagcgactacgacgtcgaccacatcgtcccgcagagcttcctgaaggacgacagcatcgacaacaaggtcctgacaagaagcgacaagaacagaggaaagagcgacaacgtcccgagcgaagaagtcgtcaagaagatgaagaactactggagacagctgctgaacgcaaagctgatcacacagagaaagttcgacaacctgacaaaggcagagagaggaggactgagcgaactggacaaggcaggattcatcaagagacagctggtcgaaacaagacagatcacaaagcacgtcgcacagatcctggacagcagaatgaacacaaagtacgacgaaaacgacaagctgatcagagaagtcaaggtcatcacactgaagagcaagctggtcagcgacttcagaaaggacttccagttctacaaggtcagagaaatcaacaactaccaccacgcacacgacgcatacctgaacgcagtcgtcggaacagcactgatcaagaagtacccgaagctggaaagcgaattcgtctacggagactacaaggtctacgacgtcagaaagatgatcgcaaagagcgaacaggaaatcggaaaggcaacagcaaagtacttcttctacagcaacatcatgaacttcttcaagacagaaatcacactggcaaacggagaaatcagaaagagaccgctgatcgaaacaaacggagaaacaggagaaatcgtctgggacaagggaagagacttcgcaacagtcagaaaggtcctgagcatgccgcaggtcaacatcgtcaagaagacagaagtccagacaggaggattcagcaaggaaagcatcctgccgaagagaaacagcgacaagctgatcgcaagaaagaaggactgggacccgaagaagtacggaggattcgacagcccgacagtcgcatacagcgtcctggtcgtcgcaaaggtcgaaaagggaaagagcaagaagctgaagagcgtcaaggaactgctgggaatcacaatcatggaaagaagcagcttcgaaaagaacccgatcgacttcctggaagcaaagggatacaaggaagtcaagaaggacctgatcatcaagctgccgaagtacagcctgttcgaactggaaaacggaagaaagagaatgctggcaagcgcaggagaactgcagaagggaaacgaactggcactgccgagcaagtacgtcaacttcctgtacctggcaagccactacgaaaagctgaagggaagcccggaagacaacgaacagaagcagctgttcgtcgaacagcacaagcactacctggacgaaatcatcgaacagatcagcgaattcagcaagagagtcatcctggcagacgcaaacctggacaaggtcctgagcgcatacaacaagcacagagacaagccgatcagagaacaggcagaaaacatcatccacctgttcacactgacaaacctgggagcaccggcagcattcaagtacttcgacacaacaatcgacagaaagagatacacaagcacaaaggaagtcctggacgcaacactgatccaccagagcatcacaggactgtacgaaacaagaatcgacctgagccagctgggaggagacggaggaggaagcgcagcagcaaagagaagctggagcatggcattctag

SEQ ID NO: 338 - DNA, 4149 bp, Artificial Sequence
  Synthetic: Open reading frame for Cas9 with NLS9, with start and stop codons
atggacaagaagtacagcatcggactggacatcggaacaaacagcgtcggatgggcagtcatcacagacgaatacaaggtcccgagcaagaagttcaaggtcctgggaaacacagacagacacagcatcaagaagaacctgatcggagcactgctgttcgacagcggagaaacagcagaagcaacaagactgaagagaacagcaagaagaagatacacaagaagaaagaacagaatctgctacctgcaggaaatcttcagcaacgaaatggcaaaggtcgacgacagcttcttccacagactggaagaaagcttcctggtcgaagaagacaagaagcacgaaagacacccgatcttcggaaacatcgtcgacgaagtcgcataccacgaaaagtacccgacaatctaccacctgagaaagaagctggtcgacagcacagacaaggcagacctgagactgatctacctggcactggcacacatgatcaagttcagaggacacttcctgatcgaaggagacctgaacccggacaacagcgacgtcgacaagctgttcatccagctggtccagacatacaaccagctgttcgaagaaaacccgatcaacgcaagcggagtcgacgcaaaggcaatcctgagcgcaagactgagcaagagcagaagactggaaaacctgatcgcacagctgccgggagaaaagaagaacggactgttcggaaacctgatcgcactgagcctgggactgacaccgaacttcaagagcaacttcgacctggcagaagacgcaaagctgcagctgagcaaggacacatacgacgacgacctggacaacctgctggcacagatcggagaccagtacgcagacctgttcctggcagcaaagaacctgagcgacgcaatcctgctgagcgacatcctgagagtcaacacagaaatcacaaaggcaccgctgagcgcaagcatgatcaagagatacgacgaacaccaccaggacctgacactgctgaaggcactggtcagacagcagctgccggaaaagtacaaggaaatcttcttcgaccagagcaagaacggatacgcaggatacatcgacggaggagcaagccaggaagaattctacaagttcatcaagccgatcctggaaaagatggacggaacagaagaactgctggtcaagctgaacagagaagacctgctgagaaagcagagaacattcgacaacggaagcatcccgcaccagatccacctgggagaactgcacgcaatcctgagaagacaggaagacttctacccgttcctgaaggacaacagagaaaagatcgaaaagatcctgacattcagaatcccgtactacgtcggaccgctggcaagaggaaacagcagattcgcatggatgacaagaaagagcgaagaaacaatcacaccgtggaacttcgaagaagtcgtcgacaagggagcaagcgcacagagcttcatcgaaagaatgacaaacttcgacaagaacctgccgaacgaaaaggtcctgccgaagcacagcctgctgtacgaatacttcacagtctacaacgaactgacaaaggtcaagtacgtcacagaaggaatgagaaagccggcattcctgagcggagaacagaagaaggcaatcgtcgacctgctgttcaagacaaacagaaaggtcacagtcaagcagctgaaggaagactacttcaagaagatcgaatgcttcgacagcgtcgaaatcagcggagtcgaagacagattcaacgcaagcctgggaacataccacgacctgctgaagatcatcaaggacaaggacttcctggacaacgaagaaaacgaagacatcctggaagacatcgtcctgacactgacactgttcgaagacagagaaatgatcgaagaaagactgaagacatacgcacacctgttcgacgacaaggtcatgaagcagctgaagagaagaagatacacaggatggggaagactgagcagaaagctgatcaacggaatcagagacaagcagagcggaaagacaatcctggacttcctgaagagcgacggattcgcaaacagaaacttcatgcagctgatccacgacgacagcctgacattcaaggaagacatccagaaggcacaggtcagcggacagggagacagcctgcacgaacacatcgcaaacctggcaggaagcccggcaatcaagaagggaatcctgcagacagtcaaggtcgtcgacgaactggtcaaggtcatgggaagacacaagccggaaaacatcgtcatcgaaatggcaagagaaaaccagacaacacagaagggacagaagaacagcagagaaagaatgaagagaatcgaagaaggaatcaaggaactgggaagccagatcctgaaggaacacccggtcgaaaacacacagctgcagaacgaaaagctgtacctgtactacctgcagaacggaagagacatgtacgtcgaccaggaactggacatcaacagactgagcgactacgacgtcgaccacatcgtcccgcagagcttcctgaaggacgacagcatcgacaacaaggtcctgacaagaagcgacaagaacagaggaaagagcgacaacgtcccgagcgaagaagtcgtcaagaagatgaagaactactggagacagctgctgaacgcaaagctgatcacacagagaaagttcgacaacctgacaaaggcagagagaggaggactgagcgaactggacaaggcaggattcatcaagagacagctggtcgaaacaagacagatcacaaagcacgtcgcacagatcctggacagcagaatgaacacaaagtacgacgaaaacgacaagctgatcagagaagtcaaggtcatcacactgaagagcaagctggtcagcgacttcagaaaggacttccagttctacaaggtcagagaaatcaacaactaccaccacgcacacgacgcatacctgaacgcagtcgtcggaacagcactgatcaagaagtacccgaagctggaaagcgaattcgtctacggagactacaaggtctacgacgtcagaaagatgatcgcaaagagcgaacaggaaatcggaaaggcaacagcaaagtacttcttctacagcaacatcatgaacttcttcaagacagaaatcacactggcaaacggagaaatcagaaagagaccgctgatcgaaacaaacggagaaacaggagaaatcgtctgggacaagggaagagacttcgcaacagtcagaaaggtcctgagcatgccgcaggtcaacatcgtcaagaagacagaagtccagacaggaggattcagcaaggaaagcatcctgccgaagagaaacagcgacaagctgatcgcaagaaagaaggactgggacccgaagaagtacggaggattcgacagcccgacagtcgcatacagcgtcctggtcgtcgcaaaggtcgaaaagggaaagagcaagaagctgaagagcgtcaaggaactgctgggaatcacaatcatggaaagaagcagcttcgaaaagaacccgatcgacttcctggaagcaaagggatacaaggaagtcaagaaggacctgatcatcaagctgccgaagtacagcctgttcgaactggaaaacggaagaaagagaatgctggcaagcgcaggagaactgcagaagggaaacgaactggcactgccgagcaagtacgtcaacttcctgtacctggcaagccactacgaaaagctgaagggaagcccggaagacaacgaacagaagcagctgttcgtcgaacagcacaagcactacctggacgaaatcatcgaacagatcagcgaattcagcaagagagtcatcctggcagacgcaaacctggacaaggtcctgagcgcatacaacaagcacagagacaagccgatcagagaacaggcagaaaacatcatccacctgttcacactgacaaacctgggagcaccggcagcattcaagtacttcgacacaacaatcgacagaaagagatacacaagcacaaaggaagtcctggacgcaacactgatccaccagagcatcacaggactgtacgaaacaagaatcgacctgagccagctgggaggagacggaggaggaagcgcagcagcaaagagaaagtacttcgcagcatag

SEQ ID NO: 339 - DNA, 4149 bp, Artificial Sequence
  Synthetic: Open reading frame for Cas9 with NLS10, with start and stop codons
atggacaagaagtacagcatcggactggacatcggaacaaacagcgtcggatgggcagtcatcacagacgaatacaaggtcccgagcaagaagttcaaggtcctgggaaacacagacagacacagcatcaagaagaacctgatcggagcactgctgttcgacagcggagaaacagcagaagcaacaagactgaagagaacagcaagaagaagatacacaagaagaaagaacagaatctgctacctgcaggaaatcttcagcaacgaaatggcaaaggtcgacgacagcttcttccacagactggaagaaagcttcctggtcgaagaagacaagaagcacgaaagacacccgatcttcggaaacatcgtcgacgaagtcgcataccacgaaaagtacccgacaatctaccacctgagaaagaagctggtcgacagcacagacaaggcagacctgagactgatctacctggcactggcacacatgatcaagttcagaggacacttcctgatcgaaggagacctgaacccggacaacagcgacgtcgacaagctgttcatccagctggtccagacatacaaccagctgttcgaagaaaacccgatcaacgcaagcggagtcgacgcaaaggcaatcctgagcgcaagactgagcaagagcagaagactggaaaacctgatcgcacagctgccgggagaaaagaagaacggactgttcggaaacctgatcgcactgagcctgggactgacaccgaacttcaagagcaacttcgacctggcagaagacgcaaagctgcagctgagcaaggacacatacgacgacgacctggacaacctgctggcacagatcggagaccagtacgcagacctgttcctggcagcaaagaacctgagcgacgcaatcctgctgagcgacatcctgagagtcaacacagaaatcacaaaggcaccgctgagcgcaagcatgatcaagagatacgacgaacaccaccaggacctgacactgctgaaggcactggtcagacagcagctgccggaaaagtacaaggaaatcttcttcgaccagagcaagaacggatacgcaggatacatcgacggaggagcaagccaggaagaattctacaagttcatcaagccgatcctggaaaagatggacggaacagaagaactgctggtcaagctgaacagagaagacctgctgagaaagcagagaacattcgacaacggaagcatcccgcaccagatccacctgggagaactgcacgcaatcctgagaagacaggaagacttctacccgttcctgaaggacaacagagaaaagatcgaaaagatcctgacattcagaatcccgtactacgtcggaccgctggcaagaggaaacagcagattcgcatggatgacaagaaagagcgaagaaacaatcacaccgtggaacttcgaagaagtcgtcgacaagggagcaagcgcacagagcttcatcgaaagaatgacaaacttcgacaagaacctgccgaacgaaaaggtcctgccgaagcacagcctgctgtacgaatacttcacagtctacaacgaactgacaaaggtcaagtacgtcacagaaggaatgagaaagccggcattcctgagcggagaacagaagaaggcaatcgtcgacctgctgttcaagacaaacagaaaggtcacagtcaagcagctgaaggaagactacttcaagaagatcgaatgcttcgacagcgtcgaaatcagcggagtcgaagacagattcaacgcaagcctgggaacataccacgacctgctgaagatcatcaaggacaaggacttcctggacaacgaagaaaacgaagacatcctggaagacatcgtcctgacactgacactgttcgaagacagagaaatgatcgaagaaagactgaagacatacgcacacctgttcgacgacaaggtcatgaagcagctgaagagaagaagatacacaggatggggaagactgagcagaaagctgatcaacggaatcagagacaagcagagcggaaagacaatcctggacttcctgaagagcgacggattcgcaaacagaaacttcatgcagctgatccacgacgacagcctgacattcaaggaagacatccagaaggcacaggtcagcggacagggagacagcctgcacgaacacatcgcaaacctggcaggaagcccggcaatcaagaagggaatcctgcagacagtcaaggtcgtcgacgaactggtcaaggtcatgggaagacacaagccggaaaacatcgtcatcgaaatggcaagagaaaaccagacaacacagaagggacagaagaacagcagagaaagaatgaagagaatcgaagaaggaatcaaggaactgggaagccagatcctgaaggaacacccggtcgaaaacacacagctgcagaacgaaaagctgtacctgtactacctgcagaacggaagagacatgtacgtcgaccaggaactggacatcaacagactgagcgactacgacgtcgaccacatcgtcccgcagagcttcctgaaggacgacagcatcgacaacaaggtcctgacaagaagcgacaagaacagaggaaagagcgacaacgtcccgagcgaagaagtcgtcaagaagatgaagaactactggagacagctgctgaacgcaaagctgatcacacagagaaagttcgacaacctgacaaaggcagagagaggaggactgagcgaactggacaaggcaggattcatcaagagacagctggtcgaaacaagacagatcacaaagcacgtcgcacagatcctggacagcagaatgaacacaaagtacgacgaaaacgacaagctgatcagagaagtcaaggtcatcacactgaagagcaagctggtcagcgacttcagaaaggacttccagttctacaaggtcagagaaatcaacaactaccaccacgcacacgacgcatacctgaacgcagtcgtcggaacagcactgatcaagaagtacccgaagctggaaagcgaattcgtctacggagactacaaggtctacgacgtcagaaagatgatcgcaaagagcgaacaggaaatcggaaaggcaacagcaaagtacttcttctacagcaacatcatgaacttcttcaagacagaaatcacactggcaaacggagaaatcagaaagagaccgctgatcgaaacaaacggagaaacaggagaaatcgtctgggacaagggaagagacttcgcaacagtcagaaaggtcctgagcatgccgcaggtcaacatcgtcaagaagacagaagtccagacaggaggattcagcaaggaaagcatcctgccgaagagaaacagcgacaagctgatcgcaagaaagaaggactgggacccgaagaagtacggaggattcgacagcccgacagtcgcatacagcgtcctggtcgtcgcaaaggtcgaaaagggaaagagcaagaagctgaagagcgtcaaggaactgctgggaatcacaatcatggaaagaagcagcttcgaaaagaacccgatcgacttcctggaagcaaagggatacaaggaagtcaagaaggacctgatcatcaagctgccgaagtacagcctgttcgaactggaaaacggaagaaagagaatgctggcaagcgcaggagaactgcagaagggaaacgaactggcactgccgagcaagtacgtcaacttcctgtacctggcaagccactacgaaaagctgaagggaagcccggaagacaacgaacagaagcagctgttcgtcgaacagcacaagcactacctggacgaaatcatcgaacagatcagcgaattcagcaagagagtcatcctggcagacgcaaacctggacaaggtcctgagcgcatacaacaagcacagagacaagccgatcagagaacaggcagaaaacatcatccacctgttcacactgacaaacctgggagcaccggcagcattcaagtacttcgacacaacaatcgacagaaagagatacacaagcacaaaggaagtcctggacgcaacactgatccaccagagcatcacaggactgtacgaaacaagaatcgacctgagccagctgggaggagacggaggaggaagcagagcagcaaagagaaaggcattcgcagcatag

SEQ ID NO: 340 - DNA, 4149 bp, Artificial Sequence
  Synthetic: Open reading frame for Cas9 with NLS11, with start and stop codons
atggacaagaagtacagcatcggactggacatcggaacaaacagcgtcggatgggcagtcatcacagacgaatacaaggtcccgagcaagaagttcaaggtcctgggaaacacagacagacacagcatcaagaagaacctgatcggagcactgctgttcgacagcggagaaacagcagaagcaacaagactgaagagaacagcaagaagaagatacacaagaagaaagaacagaatctgctacctgcaggaaatcttcagcaacgaaatggcaaaggtcgacgacagcttcttccacagactggaagaaagcttcctggtcgaagaagacaagaagcacgaaagacacccgatcttcggaaacatcgtcgacgaagtcgcataccacgaaaagtacccgacaatctaccacctgagaaagaagctggtcgacagcacagacaaggcagacctgagactgatctacctggcactggcacacatgatcaagttcagaggacacttcctgatcgaaggagacctgaacccggacaacagcgacgtcgacaagctgttcatccagctggtccagacatacaaccagctgttcgaagaaaacccgatcaacgcaagcggagtcgacgcaaaggcaatcctgagcgcaagactgagcaagagcagaagactggaaaacctgatcgcacagctgccgggagaaaagaagaacggactgttcggaaacctgatcgcactgagcctgggactgacaccgaacttcaagagcaacttcgacctggcagaagacgcaaagctgcagctgagcaaggacacatacgacgacgacctggacaacctgctggcacagatcggagaccagtacgcagacctgttcctggcagcaaagaacctgagcgacgcaatcctgctgagcgacatcctgagagtcaacacagaaatcacaaaggcaccgctgagcgcaagcatgatcaagagatacgacgaacaccaccaggacctgacactgctgaaggcactggtcagacagcagctgccggaaaagtacaaggaaatcttcttcgaccagagcaagaacggatacgcaggatacatcgacggaggagcaagccaggaagaattctacaagttcatcaagccgatcctggaaaagatggacggaacagaagaactgctggtcaagctgaacagagaagacctgctgagaaagcagagaacattcgacaacggaagcatcccgcaccagatccacctgggagaactgcacgcaatcctgagaagacaggaagacttctacccgttcctgaaggacaacagagaaaagatcgaaaagatcctgacattcagaatcccgtactacgtcggaccgctggcaagaggaaacagcagattcgcatggatgacaagaaagagcgaagaaacaatcacaccgtggaacttcgaagaagtcgtcgacaagggagcaagcgcacagagcttcatcgaaagaatgacaaacttcgacaagaacctgccgaacgaaaaggtcctgccgaagcacagcctgctgtacgaatacttcacagtctacaacgaactgacaaaggtcaagtacgtcacagaaggaatgagaaagccggcattcctgagcggagaacagaagaaggcaatcgtcgacctgctgttcaagacaaacagaaaggtcacagtcaagcagctgaaggaagactacttcaagaagatcgaatgcttcgacagcgtcgaaatcagcggagtcgaagacagattcaacgcaagcctgggaacataccacgacctgctgaagatcatcaaggacaaggacttcctggacaacgaagaaaacgaagacatcctggaagacatcgtcctgacactgacactgttcgaagacagagaaatgatcgaagaaagactgaagacatacgcacacctgttcgacgacaaggtcatgaagcagctgaagagaagaagatacacaggatggggaagactgagcagaaagctgatcaacggaatcagagacaagcagagcggaaagacaatcctggacttcctgaagagcgacggattcgcaaacagaaacttcatgcagctgatccacgacgacagcctgacattcaaggaagacatccagaaggcacaggtcagcggacagggagacagcctgcacgaacacatcgcaaacctggcaggaagcccggcaatcaagaagggaatcctgcagacagtcaaggtcgtcgacgaactggtcaaggtcatgggaagacacaagccggaaaacatcgtcatcgaaatggcaagagaaaaccagacaacacagaagggacagaagaacagcagagaaagaatgaagagaatcgaagaaggaatcaaggaactgggaagccagatcctgaaggaacacccggtcgaaaacacacagctgcagaacgaaaagctgtacctgtactacctgcagaacggaagagacatgtacgtcgaccaggaactggacatcaacagactgagcgactacgacgtcgaccacatcgtcccgcagagcttcctgaaggacgacagcatcgacaacaaggtcctgacaagaagcgacaagaacagaggaaagagcgacaacgtcccgagcgaagaagtcgtcaagaagatgaagaactactggagacagctgctgaacgcaaagctgatcacacagagaaagttcgacaacctgacaaaggcagagagaggaggactgagcgaactggacaaggcaggattcatcaagagacagctggtcgaaacaagacagatcacaaagcacgtcgcacagatcctggacagcagaatgaacacaaagtacgacgaaaacgacaagctgatcagagaagtcaaggtcatcacactgaagagcaagctggtcagcgacttcagaaaggacttccagttctacaaggtcagagaaatcaacaactaccaccacgcacacgacgcatacctgaacgcagtcgtcggaacagcactgatcaagaagtacccgaagctggaaagcgaattcgtctacggagactacaaggtctacgacgtcagaaagatgatcgcaaagagcgaacaggaaatcggaaaggcaacagcaaagtacttcttctacagcaacatcatgaacttcttcaagacagaaatcacactggcaaacggagaaatcagaaagagaccgctgatcgaaacaaacggagaaacaggagaaatcgtctgggacaagggaagagacttcgcaacagtcagaaaggtcctgagcatgccgcaggtcaacatcgtcaagaagacagaagtccagacaggaggattcagcaaggaaagcatcctgccgaagagaaacagcgacaagctgatcgcaagaaagaaggactgggacccgaagaagtacggaggattcgacagcccgacagtcgcatacagcgtcctggtcgtcgcaaaggtcgaaaagggaaagagcaagaagctgaagagcgtcaaggaactgctgggaatcacaatcatggaaagaagcagcttcgaaaagaacccgatcgacttcctggaagcaaagggatacaaggaagtcaagaaggacctgatcatcaagctgccgaagtacagcctgttcgaactggaaaacggaagaaagagaatgctggcaagcgcaggagaactgcagaagggaaacgaactggcactgccgagcaagtacgtcaacttcctgtacctggcaagccactacgaaaagctgaagggaagcccggaagacaacgaacagaagcagctgttcgtcgaacagcacaagcactacctggacgaaatcatcgaacagatcagcgaattcagcaagagagtcatcctggcagacgcaaacctggacaaggtcctgagcgcatacaacaagcacagagacaagccgatcagagaacaggcagaaaacatcatccacctgttcacactgacaaacctgggagcaccggcagcattcaagtacttcgacacaacaatcgacagaaagagatacacaagcacaaaggaagtcctggacgcaacactgatccaccagagcatcacaggactgtacgaaacaagaatcgacctgagccagctgggaggagacggaggaggaagcagagcagcaaagagaaagtacttcgcagtctag

SEQ ID NO: 341 - DNA, 4128 bp, Artificial Sequence
  Synthetic: Cas9 ORF using codons with generally high expression in humans (no start or stop codons; suitable for inclusion in fusion protein coding sequence)
cctaagaaaaagcggaaggtcgacggggataagaagtactcaatcgggctggatatcggaactaattccgtgggttgggcagtgatcacggatgaatacaaagtgccgtccaagaagttcaaggtcctggggaacaccgatagacacagcatcaagaaaaatctcatcggagccctgctgtttgactccggcgaaaccgcagaagcgacccggctcaaacgtaccgcgaggcgacgctacacccggcggaagaatcgcatctgctatctgcaagagatcttttcgaacgaaatggcaaaggtcgacgacagcttcttccaccgcctggaagaatctttcctggtggaggaggacaagaagcatgaacggcatcctatctttggaaacatcgtcgacgaagtggcgtaccacgaaaagtacccgaccatctaccatctgcggaagaagttggttgactcaactgacaaggccgacctcagattgatctacttggccctcgcccatatgatcaaattccgcggacacttcctgatcgaaggcgatctgaaccctgataactccgacgtggataagcttttcattcaactggtgcagacctacaaccaactgttcgaagaaaacccaatcaatgctagcggcgtcgatgccaaggccatcctgtccgcccggctgtcgaagtcgcggcgcctcgaaaacctgatcgcacagctgccgggagagaaaaagaacggacttttcggcaacttgatcgctctctcactgggactcactcccaatttcaagtccaattttgacctggccgaggacgcgaagctgcaactctcaaaggacacctacgacgacgacttggacaatttgctggcacaaattggcgatcagtacgcggatctgttccttgccgctaagaacctttcggacgcaatcttgctgtccgatatcctgcgcgtgaacaccgaaataaccaaagcgccgcttagcgcctcgatgattaagcggtacgacgagcatcaccaggatctcacgctgctcaaagcgctcgtgagacagcaactgcctgaaaagtacaaggagatcttcttcgaccagtccaagaatgggtacgcagggtacatcgatggaggcgctagccaggaagagttctataagttcatcaagccaatcctggaaaagatggacggaaccgaagaactgctggtcaagctgaacagggaggatctgctccggaaacagagaacctttgacaacggatccattccccaccagatccatctgggtgagctgcacgccatcttgcggcgccaggaggacttttacccattcctcaaggacaaccgggaaaagatcgagaaaattctgacgttccgcatcccgtattacgtgggcccactggcgcgcggcaattcgcgcttcgcgtggatgactagaaaatcagaggaaaccatcactccttggaatttcgaggaagttgtggataagggagcttcggcacaaagcttcatcgaacgaatgaccaacttcgacaagaatctcccaaacgagaaggtgcttcctaagcacagcctcctttacgaatacttcactgtctacaacgaactgactaaagtgaaatacgttactgaaggaatgaggaagccggcctttctgtccggagaacagaagaaagcaattgtcgatctgctgttcaagaccaaccgcaaggtgaccgtcaagcagcttaaagaggactacttcaagaagatcgagtgtttcgactcagtggaaatcagcggggtggaggacagattcaacgcttcgctgggaacctatcatgatctcctgaagatcatcaaggacaaggacttccttgacaacgaggagaacgaggacatcctggaagatatcgtcctgaccttgacccttttcgaggatcgcgagatgatcgaggagaggcttaagacctacgctcatctcttcgacgataaggtcatgaaacaactcaagcgccgccggtacactggttggggccgcctctcccgcaagctgatcaacggtattcgcgataaacagagcggtaaaactatcctggatttcctcaaatcggatggcttcgctaatcgtaacttcatgcaattgatccacgacgacagcctgacctttaaggaggacatccaaaaagcacaagtgtccggacagggagactcactccatgaacacatcgcgaatctggccggttcgccggcgattaagaagggaattctgcaaactgtgaaggtggtcgacgagctggtgaaggtcatgggacggcacaaaccggagaatatcgtgattgaaatggcccgagaaaaccagactacccagaagggccagaaaaactcccgcgaaaggatgaagcggatcgaagaaggaatcaaggagctgggcagccagatcctgaaagagcacccggtggaaaacacgcagctgcagaacgagaagctctacctgtactatttgcaaaatggacgggacatgtacgtggaccaagagctggacatcaatcggttgtctgattacgacgtggaccacatcgttccacagtcctttctgaaggatgactcgatcgataacaaggtgttgactcgcagcgacaagaacagagggaagtcagataatgtgccatcggaggaggtcgtgaagaagatgaagaattactggcggcagctcctgaatgcgaagctgattacccagagaaagtttgacaatctcactaaagccgagcgcggcggactctcagagctggataaggctggattcatcaaacggcagctggtcgagactcggcagattaccaagcacgtggcgcagatcttggactcccgcatgaacactaaatacgacgagaacgataagctcatccgggaagtgaaggtgattaccctgaaaagcaaacttgtgtcggactttcggaaggactttcagttttacaaagtgagagaaatcaacaactaccatcacgcgcatgacgcatacctcaacgctgtggtcggtaccgccctgatcaaaaagtaccctaaacttgaatcggagtttgtgtacggagactacaaggtctacgacgtgaggaagatgatagccaagtccgaacaggaaatcgggaaagcaactgcgaaatacttcttttactcaaacatcatgaactttttcaagactgaaattacgctggccaatggagaaatcaggaagaggccactgatcgaaactaacggagaaacgggcgaaatcgtgtgggacaagggcagggacttcgcaactgttcgcaaagtgctctctatgccgcaagtcaatattgtgaagaaaaccgaagtgcaaaccggcggattttcaaaggaatcgatcctcccaaagagaaatagcgacaagctcattgcacgcaagaaagactgggacccgaagaagtacggaggattcgattcgccgactgtcgcatactccgtcctcgtggtggccaaggtggagaagggaaagagcaaaaagctcaaatccgtcaaagagctgctggggattaccatcatggaacgatcctcgttcgagaagaacccgattgatttcctcgaggcgaagggttacaaggaggtgaagaaggatctgatcatcaaactccccaagtactcactgttcgaactggaaaatggtcggaagcgcatgctggcttcggccggagaactccaaaaaggaaatgagctggccttgcctagcaagtacgtcaacttcctctatcttgcttcgcactacgaaaaactcaaagggtcaccggaagataacgaacagaagcagcttttcgtggagcagcacaagcattatctggatgaaatcatcgaacaaatctccgagttttcaaagcgcgtgatcctcgccgacgccaacctcgacaaagtcctgtcggcctacaataagcatagagataagccgatcagagaacaggccgagaacattatccacttgttcaccctgactaacctgggagccccagccgccttcaagtacttcgatactactatcgatcgcaaaagatacacgtccaccaaggaagttctggacgcgaccctgatccaccaaagcatcactggactctacgaaactaggatcgatctgtcgcagctgggtggcgat

SEQ ID NO: 342 - DNA, 4134 bp, Artificial Sequence
  Synthetic: Cas9 ORF using long half life codons of Table 4 (no start or stop codons; suitable for inclusion in fusion protein coding sequence)
gacaagaagtactctatcggtttggacatcggtaccaactctgtcggttgggccgtcatcaccgacgaatacaaggtcccatctaagaagttcaaggtcttgggtaacaccgacagacactctatcaagaagaacttgatcggtgccttgttgttcgactctggtgaaaccgccgaagccaccagattgaagagaaccgccagaagaagatacaccagaagaaagaacagaatctgctacttgcaagaaatcttctctaacgaaatggccaaggtcgacgactctttcttccacagattggaagaatctttcttggtcgaagaagacaagaagcacgaaagacacccaatcttcggtaacatcgtcgacgaagtcgcctaccacgaaaagtacccaaccatctaccacttgagaaagaagttggtcgactctaccgacaaggccgacttgagattgatctacttggccttggcccacatgatcaagttcagaggtcacttcttgatcgaaggtgacttgaacccagacaactctgacgtcgacaagttgttcatccaattggtccaaacctacaaccaattgttcgaagaaaacccaatcaacgcctctggtgtcgacgccaaggccatcttgtctgccagattgtctaagagcagaagattggaaaacttgatcgcccaattgccaggtgaaaagaagaacggtttgttcggtaacttgatcgccttgtctttgggtttgaccccaaacttcaagtctaacttcgacttggccgaagacgccaagttgcaattgtctaaggacacctacgacgacgacttggacaacttgttggcccaaatcggtgaccaatacgccgacttgttcttggccgccaagaacttgtctgacgccatcttgttgtctgacatcttgagagtcaacaccgaaatcaccaaggccccattgtctgcctctatgatcaagagatacgacgaacaccaccaagacttgaccttgttgaaggccttggtcagacaacaattgccagaaaagtacaaggaaatcttcttcgaccaatctaagaacggttacgccggttacatcgacggtggtgcctctcaagaagaattctacaagttcatcaagccaatcttggaaaagatggacggtaccgaagaattgttggtcaagttgaacagagaagacttgttgagaaagcaaagaaccttcgacaacggttctatcccacaccaaatccacttgggtgaattgcacgccatcttgagaagacaagaagacttctacccattcttgaaggacaacagagaaaagatcgaaaagatcttgaccttcagaatcccatactacgtcggtccattggccagaggtaacagcagattcgcctggatgaccagaaagtctgaagaaaccatcaccccatggaacttcgaagaagtcgtcgacaagggtgcctctgcccaatctttcatcgaaagaatgaccaacttcgacaagaacttgccaaacgaaaaggtcttgccaaagcactctttgttgtacgaatacttcaccgtctacaacgaattgaccaaggtcaagtacgtcaccgaaggtatgagaaagccagccttcttgtctggtgaacaaaagaaggccatcgtcgacttgttgttcaagaccaacagaaaggtcaccgtcaagcaattgaaggaagactacttcaagaagatcgaatgcttcgactctgtcgaaatctctggtgtcgaagacagattcaacgcctctttgggtacctaccacgacttgttgaagatcatcaaggacaaggacttcttggacaacgaagaaaacgaagacatcttggaagacatcgtcttgaccttgaccttgttcgaagacagagaaatgatcgaagaaagattgaagacctacgcccacttgttcgacgacaaggtcatgaagcaattgaagagaagaagatacaccggttggggtagattgagcagaaagttgatcaacggtatcagagacaagcaatctggtaagaccatcttggacttcttgaagtctgacggtttcgccaacagaaacttcatgcaattgatccacgacgactctttgaccttcaaggaagacatccaaaaggcccaagtctctggtcaaggtgactctttgcacgaacacatcgccaacttggccggttctccagccatcaagaagggtatcttgcaaaccgtcaaggtcgtcgacgaattggtcaaggtcatgggtagacacaagccagaaaacatcgtcatcgaaatggccagagaaaaccaaaccacccaaaagggtcaaaagaacagcagagaaagaatgaagagaatcgaagaaggtatcaaggaattgggttctcaaatcttgaaggaacacccagtcgaaaacacccaattgcaaaacgaaaagttgtacttgtactacttgcaaaacggtagagacatgtacgtcgaccaagaattggacatcaacagattgtctgactacgacgtcgaccacatcgtcccacaatctttcttgaaggacgactctatcgacaacaaggtcttgaccagatctgacaagaacagaggtaagtctgacaacgtcccatctgaagaagtcgtcaagaagatgaagaactactggagacaattgttgaacgccaagttgatcacccaaagaaagttcgacaacttgaccaaggccgaaagaggtggtttgtctgaattggacaaggccggtttcatcaagagacaattggtcgaaaccagacaaatcaccaagcacgtcgcccaaatcttggacagcagaatgaacaccaagtacgacgaaaacgacaagttgatcagagaagtcaaggtcatcaccttgaagtctaagttggtctctgacttcagaaaggacttccaattctacaaggtcagagaaatcaacaactaccaccacgcccacgacgcctacttgaacgccgtcgtcggtaccgccttgatcaagaagtacccaaagttggaatctgaattcgtctacggtgactacaaggtctacgacgtcagaaagatgatcgccaagtctgaacaagaaatcggtaaggccaccgccaagtacttcttctactctaacatcatgaacttcttcaagaccgaaatcaccttggccaacggtgaaatcagaaagagaccattgatcgaaaccaacggtgaaaccggtgaaatcgtctgggacaagggtagagacttcgccaccgtcagaaaggtcttgtctatgccacaagtcaacatcgtcaagaagaccgaagtccaaaccggtggtttctctaaggaatctatcttgccaaagagaaactctgacaagttgatcgccagaaagaaggactgggacccaaagaagtacggtggtttcgactctccaaccgtcgcctactctgtcttggtcgtcgccaaggtcgaaaagggtaagtctaagaagttgaagtctgtcaaggaattgttgggtatcaccatcatggaaagatcttctttcgaaaagaacccaatcgacttcttggaagccaagggttacaaggaagtcaagaaggacttgatcatcaagttgccaaagtactctttgttcgaattggaaaacggtagaaagagaatgttggcctctgccggtgaattgcaaaagggtaacgaattggccttgccatctaagtacgtcaacttcttgtacttggcctctcactacgaaaagttgaagggttctccagaagacaacgaacaaaagcaattgttcgtcgaacaacacaagcactacttggacgaaatcatcgaacaaatctctgaattctctaagagagtcatcttggccgacgccaacttggacaaggtcttgtctgcctacaacaagcacagagacaagccaatcagagaacaagccgaaaacatcatccacttgttcaccttgaccaacttgggtgccccagccgccttcaagtacttcgacaccaccatcgacagaaagagatacacctctaccaaggaagtcttggacgccaccttgatccaccaatctatcaccggtttgtacgaaaccagaatcgacttgtctcaattgggtggtgacggtggtggttctccaaagaagaagagaaaggtc

SEQ ID NO: 343 - DNA, 4134 bp, Artificial Sequence
  Synthetic: Cas9 ORF using U rich codons of Table 4 (no start or stop codons; suitable for inclusion in fusion protein coding sequence)
gataaaaaatattctattggtttagatattggtactaattctgttggttgggctgttattactgatgaatataaagttccttctaaaaaatttaaagttttaggtaatactgatcgtcattctattaaaaaaaatttaattggtgctttattatttgattctggtgaaactgctgaagctactcgtttaaaacgtactgctcgtcgtcgttatactcgtcgtaaaaatcgtatttgttatttacaagaaattttttctaatgaaatggctaaagttgatgattctttttttcatcgtttagaagaatcttttttagttgaagaagataaaaaacatgaacgtcatcctatttttggtaatattgttgatgaagttgcttatcatgaaaaatatcctactatttatcatttacgtaaaaaattagttgattctactgataaagctgatttacgtttaatttatttagctttagctcatatgattaaatttcgtggtcattttttaattgaaggtgatttaaatcctgataattctgatgttgataaattatttattcaattagttcaaacttataatcaattatttgaagaaaatcctattaatgcttctggtgttgatgctaaagctattttatctgctcgtttatctaaatctcgtcgtttagaaaatttaattgctcaattacctggtgaaaaaaaaaatggtttatttggtaatttaattgctttatctttaggtttaactcctaattttaaatctaattttgatttagctgaagatgctaaattacaattatctaaagatacttatgatgatgatttagataatttattagctcaaattggtgatcaatatgctgatttatttttagctgctaaaaatttatctgatgctattttattatctgatattttacgtgttaatactgaaattactaaagctcctttatctgcttctatgattaaacgttatgatgaacatcatcaagatttaactttattaaaagctttagttcgtcaacaattacctgaaaaatataaagaaattttttttgatcaatctaaaaatggttatgctggttatattgatggtggtgcttctcaagaagaattttataaatttattaaacctattttagaaaaaatggatggtactgaagaattattagttaaattaaatcgtgaagatttattacgtaaacaacgtacttttgataatggttctattcctcatcaaattcatttaggtgaattacatgctattttacgtcgtcaagaagatttttatccttttttaaaagataatcgtgaaaaaattgaaaaaattttaacttttcgtattccttattatgttggtcctttagctcgtggtaattctcgttttgcttggatgactcgtaaatctgaagaaactattactccttggaattttgaagaagttgttgataaaggtgcttctgctcaatcttttattgaacgtatgactaattttgataaaaatttacctaatgaaaaagttttacctaaacattctttattatatgaatattttactgtttataatgaattaactaaagttaaatatgttactgaaggtatgcgtaaacctgcttttttatctggtgaacaaaaaaaagctattgttgatttattatttaaaactaatcgtaaagttactgttaaacaattaaaagaagattattttaaaaaaattgaatgttttgattctgttgaaatttctggtgttgaagatcgttttaatgcttctttaggtacttatcatgatttattaaaaattattaaagataaagattttttagataatgaagaaaatgaagatattttagaagatattgttttaactttaactttatttgaagatcgtgaaatgattgaagaacgtttaaaaacttatgctcatttatttgatgataaagttatgaaacaattaaaacgtcgtcgttatactggttggggtcgtttatctcgtaaattaattaatggtattcgtgataaacaatctggtaaaactattttagattttttaaaatctgatggttttgctaatcgtaattttatgcaattaattcatgatgattctttaacttttaaagaagatattcaaaaagctcaagtttctggtcaaggtgattctttacatgaacatattgctaatttagctggttctcctgctattaaaaaaggtattttacaaactgttaaagttgttgatgaattagttaaagttatgggtcgtcataaacctgaaaatattgttattgaaatggctcgtgaaaatcaaactactcaaaaaggtcaaaaaaattctcgtgaacgtatgaaacgtattgaagaaggtattaaagaattaggttctcaaattttaaaagaacatcctgttgaaaatactcaattacaaaatgaaaaattatatttatattatttacaaaatggtcgtgatatgtatgttgatcaagaattagatattaatcgtttatctgattatgatgttgatcatattgttcctcaatcttttttaaaagatgattctattgataataaagttttaactcgttctgataaaaatcgtggtaaatctgataatgttccttctgaagaagttgttaaaaaaatgaaaaattattggcgtcaattattaaatgctaaattaattactcaacgtaaatttgataatttaactaaagctgaacgtggtggtttatctgaattagataaagctggttttattaaacgtcaattagttgaaactcgtcaaattactaaacatgttgctcaaattttagattctcgtatgaatactaaatatgatgaaaatgataaattaattcgtgaagttaaagttattactttaaaatctaaattagtttctgattttcgtaaagattttcaattttataaagttcgtgaaattaataattatcatcatgctcatgatgcttatttaaatgctgttgttggtactgctttaattaaaaaatatcctaaattagaatctgaatttgtttatggtgattataaagtttatgatgttcgtaaaatgattgctaaatctgaacaagaaattggtaaagctactgctaaatattttttttattctaatattatgaatttttttaaaactgaaattactttagctaatggtgaaattcgtaaacgtcctttaattgaaactaatggtgaaactggtgaaattgtttgggataaaggtcgtgattttgctactgttcgtaaagttttatctatgcctcaagttaatattgttaaaaaaactgaagttcaaactggtggtttttctaaagaatctattttacctaaacgtaattctgataaattaattgctcgtaaaaaagattgggatcctaaaaaatatggtggttttgattctcctactgttgcttattctgttttagttgttgctaaagttgaaaaaggtaaatctaaaaaattaaaatctgttaaagaattattaggtattactattatggaacgttcttcttttgaaaaaaatcctattgattttttagaagctaaaggttataaagaagttaaaaaagatttaattattaaattacctaaatattctttatttgaattagaaaatggtcgtaaacgtatgttagcttctgctggtgaattacaaaaaggtaatgaattagctttaccttctaaatatgttaattttttatatttagcttctcattatgaaaaattaaaaggttctcctgaagataatgaacaaaaacaattatttgttgaacaacataaacattatttagatgaaattattgaacaaatttctgaattttctaaacgtgttattttagctgatgctaatttagataaagttttatctgcttataataaacatcgtgataaacctattcgtgaacaagctgaaaatattattcatttatttactttaactaatttaggtgctcctgctgcttttaaatattttgatactactattgatcgtaaacgttatacttctactaaagaagttttagatgctactttaattcatcaatctattactggtttatatgaaactcgtattgatttatctcaattaggtggtgatggtggtggttctcctaaaaaaaaacgtaaagtt

SEQ ID NO: 344 - DNA, 4134 bp, Artificial Sequence
  Synthetic: Cas9 ORF using low G codons of Table 4 (no start or stop codons; suitable for inclusion in fusion protein coding sequence)
gacaaaaaatactccatcggcctcgacatcggcaccaactccgtcggctgggccgtcatcaccgacgaatacaaagtcccctccaaaaaattcaaagtcctcggcaacaccgacagacactccatcaaaaaaaacctcatcggcgccctcctcttcgactccggcgaaaccgccgaagccaccagactcaaaagaaccgccagaagaagatacaccagaagaaaaaacagaatctgctacctccaagaaatcttctccaacgaaatggccaaagtcgacgactccttcttccacagactcgaagaatccttcctcgtcgaagaagacaaaaaacacgaaagacaccccatcttcggcaacatcgtcgacgaagtcgcctaccacgaaaaataccccaccatctaccacctcagaaaaaaactcgtcgactccaccgacaaagccgacctcagactcatctacctcgccctcgcccacatgatcaaattcagaggccacttcctcatcgaaggcgacctcaaccccgacaactccgacgtcgacaaactcttcatccaactcgtccaaacctacaaccaactcttcgaagaaaaccccatcaacgcctccggcgtcgacgccaaagccatcctctccgccagactctccaaatccagaagactcgaaaacctcatcgcccaactccccggcgaaaaaaaaaacggcctcttcggcaacctcatcgccctctccctcggcctcacccccaacttcaaatccaacttcgacctcgccgaagacgccaaactccaactctccaaagacacctacgacgacgacctcgacaacctcctcgcccaaatcggcgaccaatacgccgacctcttcctcgccgccaaaaacctctccgacgccatcctcctctccgacatcctcagagtcaacaccgaaatcaccaaagcccccctctccgcctccatgatcaaaagatacgacgaacaccaccaagacctcaccctcctcaaagccctcgtcagacaacaactccccgaaaaatacaaagaaatcttcttcgaccaatccaaaaacggctacgccggctacatcgacggcggcgcctcccaagaagaattctacaaattcatcaaacccatcctcgaaaaaatggacggcaccgaagaactcctcgtcaaactcaacagagaagacctcctcagaaaacaaagaaccttcgacaacggctccatcccccaccaaatccacctcggcgaactccacgccatcctcagaagacaagaagacttctaccccttcctcaaagacaacagagaaaaaatcgaaaaaatcctcaccttcagaatcccctactacgtcggccccctcgccagaggcaactccagattcgcctggatgaccagaaaatccgaagaaaccatcaccccctggaacttcgaagaagtcgtcgacaaaggcgcctccgcccaatccttcatcgaaagaatgaccaacttcgacaaaaacctccccaacgaaaaagtcctccccaaacactccctcctctacgaatacttcaccgtctacaacgaactcaccaaagtcaaatacgtcaccgaaggcatgagaaaacccgccttcctctccggcgaacaaaaaaaagccatcgtcgacctcctcttcaaaaccaacagaaaagtcaccgtcaaacaactcaaagaagactacttcaaaaaaatcgaatgcttcgactccgtcgaaatctccggcgtcgaagacagattcaacgcctccctcggcacctaccacgacctcctcaaaatcatcaaagacaaagacttcctcgacaacgaagaaaacgaagacatcctcgaagacatcgtcctcaccctcaccctcttcgaagacagagaaatgatcgaagaaagactcaaaacctacgcccacctcttcgacgacaaagtcatgaaacaactcaaaagaagaagatacaccggctggggcagactctccagaaaactcatcaacggcatcagagacaaacaatccggcaaaaccatcctcgacttcctcaaatccgacggcttcgccaacagaaacttcatgcaactcatccacgacgactccctcaccttcaaagaagacatccaaaaagcccaagtctccggccaaggcgactccctccacgaacacatcgccaacctcgccggctcccccgccatcaaaaaaggcatcctccaaaccgtcaaagtcgtcgacgaactcgtcaaagtcatgggcagacacaaacccgaaaacatcgtcatcgaaatggccagagaaaaccaaaccacccaaaaaggccaaaaaaactccagagaaagaatgaaaagaatcgaagaaggcatcaaagaactcggctcccaaatcctcaaagaacaccccgtcgaaaacacccaactccaaaacgaaaaactctacctctactacctccaaaacggcagagacatgtacgtcgaccaagaactcgacatcaacagactctccgactacgacgtcgaccacatcgtcccccaatccttcctcaaagacgactccatcgacaacaaagtcctcaccagatccgacaaaaacagaggcaaatccgacaacgtcccctccgaagaagtcgtcaaaaaaatgaaaaactactggagacaactcctcaacgccaaactcatcacccaaagaaaattcgacaacctcaccaaagccgaaagaggcggcctctccgaactcgacaaagccggcttcatcaaaagacaactcgtcgaaaccagacaaatcaccaaacacgtcgcccaaatcctcgactccagaatgaacaccaaatacgacgaaaacgacaaactcatcagagaagtcaaagtcatcaccctcaaatccaaactcgtctccgacttcagaaaagacttccaattctacaaagtcagagaaatcaacaactaccaccacgcccacgacgcctacctcaacgccgtcgtcggcaccgccctcatcaaaaaataccccaaactcgaatccgaattcgtctacggcgactacaaagtctacgacgtcagaaaaatgatcgccaaatccgaacaagaaatcggcaaagccaccgccaaatacttcttctactccaacatcatgaacttcttcaaaaccgaaatcaccctcgccaacggcgaaatcagaaaaagacccctcatcgaaaccaacggcgaaaccggcgaaatcgtctgggacaaaggcagagacttcgccaccgtcagaaaagtcctctccatgccccaagtcaacatcgtcaaaaaaaccgaagtccaaaccggcggcttctccaaagaatccatcctccccaaaagaaactccgacaaactcatcgccagaaaaaaagactgggaccccaaaaaatacggcggcttcgactcccccaccgtcgcctactccgtcctcgtcgtcgccaaagtcgaaaaaggcaaatccaaaaaactcaaatccgtcaaagaactcctcggcatcaccatcatggaaagatcctccttcgaaaaaaaccccatcgacttcctcgaagccaaaggctacaaagaagtcaaaaaagacctcatcatcaaactccccaaatactccctcttcgaactcgaaaacggcagaaaaagaatgctcgcctccgccggcgaactccaaaaaggcaacgaactcgccctcccctccaaatacgtcaacttcctctacctcgcctcccactacgaaaaactcaaaggctcccccgaagacaacgaacaaaaacaactcttcgtcgaacaacacaaacactacctcgacgaaatcatcgaacaaatctccgaattctccaaaagagtcatcctcgccgacgccaacctcgacaaagtcctctccgcctacaacaaacacagagacaaacccatcagagaacaagccgaaaacatcatccacctcttcaccctcaccaacctcggcgcccccgccgccttcaaatacttcgacaccaccatcgacagaaaaagatacacctccaccaaagaagtcctcgacgccaccctcatccaccaatccatcaccggcctctacgaaaccagaatcgacctctcccaactcggcggcgacggcggcggctcccccaaaaaaaaaagaaaagtc

SEQ ID NO: 345 - DNA, 4134 bp, Artificial Sequence
  Synthetic: Cas9 ORF using low C codons of Table 4 (no start or stop codons; suitable for inclusion in fusion protein coding sequence)
gataagaagtatagtattggattggatattggaacaaatagtgtgggatgggctgtgattacagatgagtataaggtgcctagtaagaagtttaaggtgttgggaaatacagatagacatagtattaagaagaatttgattggagctttgttgtttgatagtggagagacagctgaggctacaagattgaagagaacagctagaagaagatatacaagaagaaagaatagaatttgttatttgcaggagatttttagtaatgagatggctaaggtggatgatagtttttttcatagattggaggagagttttttggtggaggaggataagaagcatgagagacatcctatttttggaaatattgtggatgaggtggcttatcatgagaagtatcctacaatttatcatttgagaaagaagttggtggatagtacagataaggctgatttgagattgatttatttggctttggctcatatgattaagtttagaggacattttttgattgagggagatttgaatcctgataatagtgatgtggataagttgtttattcagttggtgcagacatataatcagttgtttgaggagaatcctattaatgctagtggagtggatgctaaggctattttgagtgctagattgagtaagagtagaagattggagaatttgattgctcagttgcctggagagaagaagaatggattgtttggaaatttgattgctttgagtttgggattgacacctaattttaagagtaattttgatttggctgaggatgctaagttgcagttgagtaaggatacatatgatgatgatttggataatttgttggctcagattggagatcagtatgctgatttgtttttggctgctaagaatttgagtgatgctattttgttgagtgatattttgagagtgaatacagagattacaaaggctcctttgagtgctagtatgattaagagatatgatgagcatcatcaggatttgacattgttgaaggctttggtgagacagcagttgcctgagaagtataaggagattttttttgatcagagtaagaatggatatgctggatatattgatggaggagctagtcaggaggagttttataagtttattaagcctattttggagaagatggatggaacagaggagttgttggtgaagttgaatagagaggatttgttgagaaagcagagaacatttgataatggaagtattcctcatcagattcatttgggagagttgcatgctattttgagaagacaggaggatttttatccttttttgaaggataatagagagaagattgagaagattttgacatttagaattccttattatgtgggacctttggctagaggaaatagtagatttgcttggatgacaagaaagagtgaggagacaattacaccttggaattttgaggaggtggtggataagggagctagtgctcagagttttattgagagaatgacaaattttgataagaatttgcctaatgagaaggtgttgcctaagcatagtttgttgtatgagtattttacagtgtataatgagttgacaaaggtgaagtatgtgacagagggaatgagaaagcctgcttttttgagtggagagcagaagaaggctattgtggatttgttgtttaagacaaatagaaaggtgacagtgaagcagttgaaggaggattattttaagaagattgagtgttttgatagtgtggagattagtggagtggaggatagatttaatgctagtttgggaacatatcatgatttgttgaagattattaaggataaggattttttggataatgaggagaatgaggatattttggaggatattgtgttgacattgacattgtttgaggatagagagatgattgaggagagattgaagacatatgctcatttgtttgatgataaggtgatgaagcagttgaagagaagaagatatacaggatggggaagattgagtagaaagttgattaatggaattagagataagcagagtggaaagacaattttggattttttgaagagtgatggatttgctaatagaaattttatgcagttgattcatgatgatagtttgacatttaaggaggatattcagaaggctcaggtgagtggacagggagatagtttgcatgagcatattgctaatttggctggaagtcctgctattaagaagggaattttgcagacagtgaaggtggtggatgagttggtgaaggtgatgggaagacataagcctgagaatattgtgattgagatggctagagagaatcagacaacacagaagggacagaagaatagtagagagagaatgaagagaattgaggagggaattaaggagttgggaagtcagattttgaaggagcatcctgtggagaatacacagttgcagaatgagaagttgtatttgtattatttgcagaatggaagagatatgtatgtggatcaggagttggatattaatagattgagtgattatgatgtggatcatattgtgcctcagagttttttgaaggatgatagtattgataataaggtgttgacaagaagtgataagaatagaggaaagagtgataatgtgcctagtgaggaggtggtgaagaagatgaagaattattggagacagttgttgaatgctaagttgattacacagagaaagtttgataatttgacaaaggctgagagaggaggattgagtgagttggataaggctggatttattaagagacagttggtggagacaagacagattacaaagcatgtggctcagattttggatagtagaatgaatacaaagtatgatgagaatgataagttgattagagaggtgaaggtgattacattgaagagtaagttggtgagtgattttagaaaggattttcagttttataaggtgagagagattaataattatcatcatgctcatgatgcttatttgaatgctgtggtgggaacagctttgattaagaagtatcctaagttggagagtgagtttgtgtatggagattataaggtgtatgatgtgagaaagatgattgctaagagtgagcaggagattggaaaggctacagctaagtattttttttatagtaatattatgaatttttttaagacagagattacattggctaatggagagattagaaagagacctttgattgagacaaatggagagacaggagagattgtgtgggataagggaagagattttgctacagtgagaaaggtgttgagtatgcctcaggtgaatattgtgaagaagacagaggtgcagacaggaggatttagtaaggagagtattttgcctaagagaaatagtgataagttgattgctagaaagaaggattgggatcctaagaagtatggaggatttgatagtcctacagtggcttatagtgtgttggtggtggctaaggtggagaagggaaagagtaagaagttgaagagtgtgaaggagttgttgggaattacaattatggagagaagtagttttgagaagaatcctattgattttttggaggctaagggatataaggaggtgaagaaggatttgattattaagttgcctaagtatagtttgtttgagttggagaatggaagaaagagaatgttggctagtgctggagagttgcagaagggaaatgagttggctttgcctagtaagtatgtgaattttttgtatttggctagtcattatgagaagttgaagggaagtcctgaggataatgagcagaagcagttgtttgtggagcagcataagcattatttggatgagattattgagcagattagtgagtttagtaagagagtgattttggctgatgctaatttggataaggtgttgagtgcttataataagcatagagataagcctattagagagcaggctgagaatattattcatttgtttacattgacaaatttgggagctcctgctgcttttaagtattttgatacaacaattgatagaaagagatatacaagtacaaaggaggtgttggatgctacattgattcatcagagtattacaggattgtatgagacaagaattgatttgagtcagttgggaggagatggaggaggaagtcctaagaagaagagaaaggtg

SEQ ID NO: 346 - DNA, 4134 bp, Artificial Sequence
  Synthetic: Cas9 ORF using low A codons of Table 4 (no start or stop codons; suitable for inclusion in fusion protein coding sequence)
gacaagaagtactccatcggcctggacatcggcaccaactccgtgggctgggccgtgatcaccgacgagtacaaggtgccctccaagaagttcaaggtgctgggcaacaccgaccggcactccatcaagaagaacctgatcggcgccctgctgttcgactccggcgagaccgccgaggccacccggctgaagcggaccgcccggcggcggtacacccggcggaagaaccggatctgctacctgcaggagatcttctccaacgagatggccaaggtggacgactccttcttccaccggctggaggagtccttcctggtggaggaggacaagaagcacgagcggcaccccatcttcggcaacatcgtggacgaggtggcctaccacgagaagtaccccaccatctaccacctgcggaagaagctggtggactccaccgacaaggccgacctgcggctgatctacctggccctggcccacatgatcaagttccggggccacttcctgatcgagggcgacctgaaccccgacaactccgacgtggacaagctgttcatccagctggtgcagacctacaaccagctgttcgaggagaaccccatcaacgcctccggcgtggacgccaaggccatcctgtccgcccggctgtccaagtcccggcggctggagaacctgatcgcccagctgcccggcgagaagaagaacggcctgttcggcaacctgatcgccctgtccctgggcctgacccccaacttcaagtccaacttcgacctggccgaggacgccaagctgcagctgtccaaggacacctacgacgacgacctggacaacctgctggcccagatcggcgaccagtacgccgacctgttcctggccgccaagaacctgtccgacgccatcctgctgtccgacatcctgcgggtgaacaccgagatcaccaaggcccccctgtccgcctccatgatcaagcggtacgacgagcaccaccaggacctgaccctgctgaaggccctggtgcggcagcagctgcccgagaagtacaaggagatcttcttcgaccagtccaagaacggctacgccggctacatcgacggcggcgcctcccaggaggagttctacaagttcatcaagcccatcctggagaagatggacggcaccgaggagctgctggtgaagctgaaccgggaggacctgctgcggaagcagcggaccttcgacaacggctccatcccccaccagatccacctgggcgagctgcacgccatcctgcggcggcaggaggacttctaccccttcctgaaggacaaccgggagaagatcgagaagatcctgaccttccggatcccctactacgtgggccccctggcccggggcaactcccggttcgcctggatgacccggaagtccgaggagaccatcaccccctggaacttcgaggaggtggtggacaagggcgcctccgcccagtccttcatcgagcggatgaccaacttcgacaagaacctgcccaacgagaaggtgctgcccaagcactccctgctgtacgagtacttcaccgtgtacaacgagctgaccaaggtgaagtacgtgaccgagggcatgcggaagcccgccttcctgtccggcgagcagaagaaggccatcgtggacctgctgttcaagaccaaccggaaggtgaccgtgaagcagctgaaggaggactacttcaagaagatcgagtgcttcgactccgtggagatctccggcgtggaggaccggttcaacgcctccctgggcacctaccacgacctgctgaagatcatcaaggacaaggacttcctggacaacgaggagaacgaggacatcctggaggacatcgtgctgaccctgaccctgttcgaggaccgggagatgatcgaggagcggctgaagacctacgcccacctgttcgacgacaaggtgatgaagcagctgaagcggcggcggtacaccggctggggccggctgtcccggaagctgatcaacggcatccgggacaagcagtccggcaagaccatcctggacttcctgaagtccgacggcttcgccaaccggaacttcatgcagctgatccacgacgactccctgaccttcaaggaggacatccagaaggcccaggtgtccggccagggcgactccctgcacgagcacatcgccaacctggccggctcccccgccatcaagaagggcatcctgcagaccgtgaaggtggtggacgagctggtgaaggtgatgggccggcacaagcccgagaacatcgtgatcgagatggcccgggagaaccagaccacccagaagggccagaagaactcccgggagcggatgaagcggatcgaggagggcatcaaggagctgggctcccagatcctgaaggagcaccccgtggagaacacccagctgcagaacgagaagctgtacctgtactacctgcagaacggccgggacatgtacgtggaccaggagctggacatcaaccggctgtccgactacgacgtggaccacatcgtgccccagtccttcctgaaggacgactccatcgacaacaaggtgctgacccggtccgacaagaaccggggcaagtccgacaacgtgccctccgaggaggtggtgaagaagatgaagaactactggcggcagctgctgaacgccaagctgatcacccagcggaagttcgacaacctgaccaaggccgagcggggcggcctgtccgagctggacaaggccggcttcatcaagcggcagctggtggagacccggcagatcaccaagcacgtggcccagatcctggactcccggatgaacaccaagtacgacgagaacgacaagctgatccgggaggtgaaggtgatcaccctgaagtccaagctggtgtccgacttccggaaggacttccagttctacaaggtgcgggagatcaacaactaccaccacgcccacgacgcctacctgaacgccgtggtgggcaccgccctgatcaagaagtaccccaagctggagtccgagttcgtgtacggcgactacaaggtgtacgacgtgcggaagatgatcgccaagtccgagcaggagatcggcaaggccaccgccaagtacttcttctactccaacatcatgaacttcttcaagaccgagatcaccctggccaacggcgagatccggaagcggcccctgatcgagaccaacggcgagaccggcgagatcgtgtgggacaagggccgggacttcgccaccgtgcggaaggtgctgtccatgccccaggtgaacatcgtgaagaagaccgaggtgcagaccggcggcttctccaaggagtccatcctgcccaagcggaactccgacaagctgatcgcccggaagaaggactgggaccccaagaagtacggcggcttcgactcccccaccgtggcctactccgtgctggtggtggccaaggtggagaagggcaagtccaagaagctgaagtccgtgaaggagctgctgggcatcaccatcatggagcggtcctccttcgagaagaaccccatcgacttcctggaggccaagggctacaaggaggtgaagaaggacctgatcatcaagctgcccaagtactccctgttcgagctggagaacggccggaagcggatgctggcctccgccggcgagctgcagaagggcaacgagctggccctgccctccaagtacgtgaacttcctgtacctggcctcccactacgagaagctgaagggctcccccgaggacaacgagcagaagcagctgttcgtggagcagcacaagcactacctggacgagatcatcgagcagatctccgagttctccaagcgggtgatcctggccgacgccaacctggacaaggtgctgtccgcctacaacaagcaccgggacaagcccatccgggagcaggccgagaacatcatccacctgttcaccctgaccaacctgggcgcccccgccgccttcaagtacttcgacaccaccatcgaccggaagcggtacacctccaccaaggaggtgctggacgccaccctgatccaccagtccatcaccggcctgtacgagacccggatcgacctgtcccagctgggcggcgacggcggcggctcccccaagaagaagcggaaggtg

SEQ ID NO: 347 - DNA, 4134 bp, Artificial Sequence
  Synthetic: Cas9 ORF using low A/U codons of Table 4 (no start or stop codons; suitable for inclusion in fusion protein coding sequence)
gacaagaagtacagcatcggcctggacatcggcaccaacagcgtgggctgggccgtgatcaccgacgagtacaaggtgcccagcaagaagttcaaggtgctgggcaacaccgaccggcacagcatcaagaagaacctgatcggcgccctgctgttcgacagcggcgagaccgccgaggccacccggctgaagcggaccgcccggcggcggtacacccggcggaagaaccggatctgctacctgcaggagatcttcagcaacgagatggccaaggtggacgacagcttcttccaccggctggaggagagcttcctggtggaggaggacaagaagcacgagcggcaccccatcttcggcaacatcgtggacgaggtggcctaccacgagaagtaccccaccatctaccacctgcggaagaagctggtggacagcaccgacaaggccgacctgcggctgatctacctggccctggcccacatgatcaagttccggggccacttcctgatcgagggcgacctgaaccccgacaacagcgacgtggacaagctgttcatccagctggtgcagacctacaaccagctgttcgaggagaaccccatcaacgccagcggcgtggacgccaaggccatcctgagcgcccggctgagcaagagccggcggctggagaacctgatcgcccagctgcccggcgagaagaagaacggcctgttcggcaacctgatcgccctgagcctgggcctgacccccaacttcaagagcaacttcgacctggccgaggacgccaagctgcagctgagcaaggacacctacgacgacgacctggacaacctgctggcccagatcggcgaccagtacgccgacctgttcctggccgccaagaacctgagcgacgccatcctgctgagcgacatcctgcgggtgaacaccgagatcaccaaggcccccctgagcgccagcatgatcaagcggtacgacgagcaccaccaggacctgaccctgctgaaggccctggtgcggcagcagctgcccgagaagtacaaggagatcttcttcgaccagagcaagaacggctacgccggctacatcgacggcggcgccagccaggaggagttctacaagttcatcaagcccatcctggagaagatggacggcaccgaggagctgctggtgaagctgaaccgggaggacctgctgcggaagcagcggaccttcgacaacggcagcatcccccaccagatccacctgggcgagctgcacgccatcctgcggcggcaggaggacttctaccccttcctgaaggacaaccgggagaagatcgagaagatcctgaccttccggatcccctactacgtgggccccctggcccggggcaacagccggttcgcctggatgacccggaagagcgaggagaccatcaccccctggaacttcgaggaggtggtggacaagggcgccagcgcccagagcttcatcgagcggatgaccaacttcgacaagaacctgcccaacgagaaggtgctgcccaagcacagcctgctgtacgagtacttcaccgtgtacaacgagctgaccaaggtgaagtacgtgaccgagggcatgcggaagcccgccttcctgagcggcgagcagaagaaggccatcgtggacctgctgttcaagaccaaccggaaggtgaccgtgaagcagctgaaggaggactacttcaagaagatcgagtgcttcgacagcgtggagatcagcggcgtggaggaccggttcaacgccagcctgggcacctaccacgacctgctgaagatcatcaaggacaaggacttcctggacaacgaggagaacgaggacatcctggaggacatcgtgctgaccctgaccctgttcgaggaccgggagatgatcgaggagcggctgaagacctacgcccacctgttcgacgacaaggtgatgaagcagctgaagcggcggcggtacaccggctggggccggctgagccggaagctgatcaacggcatccgggacaagcagagcggcaagaccatcctggacttcctgaagagcgacggcttcgccaaccggaacttcatgcagctgatccacgacgacagcctgaccttcaaggaggacatccagaaggcccaggtgagcggccagggcgacagcctgcacgagcacatcgccaacctggccggcagccccgccatcaagaagggcatcctgcagaccgtgaaggtggtggacgagctggtgaaggtgatgggccggcacaagcccgagaacatcgtgatcgagatggcccgggagaaccagaccacccagaagggccagaagaacagccgggagcggatgaagcggatcgaggagggcatcaaggagctgggcagccagatcctgaaggagcaccccgtggagaacacccagctgcagaacgagaagctgtacctgtactacctgcagaacggccgggacatgtacgtggaccaggagctggacatcaaccggctgagcgactacgacgtggaccacatcgtgccccagagcttcctgaaggacgacagcatcgacaacaaggtgctgacccggagcgacaagaaccggggcaagagcgacaacgtgcccagcgaggaggtggtgaagaagatgaagaactactggcggcagctgctgaacgccaagctgatcacccagcggaagttcgacaacctgaccaaggccgagcggggcggcctgagcgagctggacaaggccggcttcatcaagcggcagctggtggagacccggcagatcaccaagcacgtggcccagatcctggacagccggatgaacaccaagtacgacgagaacgacaagctgatccgggaggtgaaggtgatcaccctgaagagcaagctggtgagcgacttccggaaggacttccagttctacaaggtgcgggagatcaacaactaccaccacgcccacgacgcctacctgaacgccgtggtgggcaccgccctgatcaagaagtaccccaagctggagagcgagttcgtgtacggcgactacaaggtgtacgacgtgcggaagatgatcgccaagagcgagcaggagatcggcaaggccaccgccaagtacttcttctacagcaacatcatgaacttcttcaagaccgagatcaccctggccaacggcgagatccggaagcggcccctgatcgagaccaacggcgagaccggcgagatcgtgtgggacaagggccgggacttcgccaccgtgcggaaggtgctgagcatgccccaggtgaacatcgtgaagaagaccgaggtgcagaccggcggcttcagcaaggagagcatcctgcccaagcggaacagcgacaagctgatcgcccggaagaaggactgggaccccaagaagtacggcggcttcgacagccccaccgtggcctacagcgtgctggtggtggccaaggtggagaagggcaagagcaagaagctgaagagcgtgaaggagctgctgggcatcaccatcatggagcggagcagcttcgagaagaaccccatcgacttcctggaggccaagggctacaaggaggtgaagaaggacctgatcatcaagctgcccaagtacagcctgttcgagctggagaacggccggaagcggatgctggccagcgccggcgagctgcagaagggcaacgagctggccctgcccagcaagtacgtgaacttcctgtacctggccagccactacgagaagctgaagggcagccccgaggacaacgagcagaagcagctgttcgtggagcagcacaagcactacctggacgagatcatcgagcagatcagcgagttcagcaagcgggtgatcctggccgacgccaacctggacaaggtgctgagcgcctacaacaagcaccgggacaagcccatccgggagcaggccgagaacatcatccacctgttcaccctgaccaacctgggcgcccccgccgccttcaagtacttcgacaccaccatcgaccggaagcggtacaccagcaccaaggaggtgctggacgccaccctgatccaccagagcatcaccggcctgtacgagacccggatcgacctgagccagctgggcggcgacggcggcggcagccccaagaagaagcggaaggtg

SEQ ID NO: 348 - DNA, 4173 bp, Artificial Sequence
  Synthetic: Cas9 ORF using low A codons of Table 4, with two C-terminal NLS sequences (no start or stop codons; suitable for inclusion in fusion protein coding sequence)
gacaagaagtactccatcggcctggacatcggcaccaactccgtgggctgggccgtgatcaccgacgagtacaaggtgccctccaagaagttcaaggtgctgggcaacaccgaccggcactccatcaagaagaacctgatcggcgccctgctgttcgactccggcgagaccgccgaggccacccggctgaagcggaccgcccggcggcggtacacccggcggaagaaccggatctgctacctgcaggagatcttctccaacgagatggccaaggtggacgactccttcttccaccggctggaggagtccttcctggtggaggaggacaagaagcacgagcggcaccccatcttcggcaacatcgtggacgaggtggcctaccacgagaagtaccccaccatctaccacctgcggaagaagctggtggactccaccgacaaggccgacctgcggctgatctacctggccctggcccacatgatcaagttccggggccacttcctgatcgagggcgacctgaaccccgacaactccgacgtggacaagctgttcatccagctggtgcagacctacaaccagctgttcgaggagaaccccatcaacgcctccggcgtggacgccaaggccatcctgtccgcccggctgtccaagtcccggcggctggagaacctgatcgcccagctgcccggcgagaagaagaacggcctgttcggcaacctgatcgccctgtccctgggcctgacccccaacttcaagtccaacttcgacctggccgaggacgccaagctgcagctgtccaaggacacctacgacgacgacctggacaacctgctggcccagatcggcgaccagtacgccgacctgttcctggccgccaagaacctgtccgacgccatcctgctgtccgacatcctgcgggtgaacaccgagatcaccaaggcccccctgtccgcctccatgatcaagcggtacgacgagcaccaccaggacctgaccctgctgaaggccctggtgcggcagcagctgcccgagaagtacaaggagatcttcttcgaccagtccaagaacggctacgccggctacatcgacggcggcgcctcccaggaggagttctacaagttcatcaagcccatcctggagaagatggacggcaccgaggagctgctggtgaagctgaaccgggaggacctgctgcggaagcagcggaccttcgacaacggctccatcccccaccagatccacctgggcgagctgcacgccatcctgcggcggcaggaggacttctaccccttcctgaaggacaaccgggagaagatcgagaagatcctgaccttccggatcccctactacgtgggccccctggcccggggcaactcccggttcgcctggatgacccggaagtccgaggagaccatcaccccctggaacttcgaggaggtggtggacaagggcgcctccgcccagtccttcatcgagcggatgaccaacttcgacaagaacctgcccaacgagaaggtgctgcccaagcactccctgctgtacgagtacttcaccgtgtacaacgagctgaccaaggtgaagtacgtgaccgagggcatgcggaagcccgccttcctgtccggcgagcagaagaaggccatcgtggacctgctgttcaagaccaaccggaaggtgaccgtgaagcagctgaaggaggactacttcaagaagatcgagtgcttcgactccgtggagatctccggcgtggaggaccggttcaacgcctccctgggcacctaccacgacctgctgaagatcatcaaggacaaggacttcctggacaacgaggagaacgaggacatcctggaggacatcgtgctgaccctgaccctgttcgaggaccgggagatgatcgaggagcggctgaagacctacgcccacctgttcgacgacaaggtgatgaagcagctgaagcggcggcggtacaccggctggggccggctgtcccggaagctgatcaacggcatccgggacaagcagtccggcaagaccatcctggacttcctgaagtccgacggcttcgccaaccggaacttcatgcagctgatccacgacgactccctgaccttcaaggaggacatccagaaggcccaggtgtccggccagggcgactccctgcacgagcacatcgccaacctggccggctcccccgccatcaagaagggcatcctgcagaccgtgaaggtggtggacgagctggtgaaggtgatgggccggcacaagcccgagaacatcgtgatcgagatggcccgggagaaccagaccacccagaagggccagaagaactcccgggagcggatgaagcggatcgaggagggcatcaaggagctgggctcccagatcctgaaggagcaccccgtggagaacacccagctgcagaacgagaagctgtacctgtactacctgcagaacggccgggacatgtacgtggaccaggagctggacatcaaccggctgtccgactacgacgtggaccacatcgtgccccagtccttcctgaaggacgactccatcgacaacaaggtgctgacccggtccgacaagaaccggggcaagtccgacaacgtgccctccgaggaggtggtgaagaagatgaagaactactggcggcagctgctgaacgccaagctgatcacccagcggaagttcgacaacctgaccaaggccgagcggggcggcctgtccgagctggacaaggccggcttcatcaagcggcagctggtggagacccggcagatcaccaagcacgtggcccagatcctggactcccggatgaacaccaagtacgacgagaacgacaagctgatccgggaggtgaaggtgatcaccctgaagtccaagctggtgtccgacttccggaaggacttccagttctacaaggtgcgggagatcaacaactaccaccacgcccacgacgcctacctgaacgccgtggtgggcaccgccctgatcaagaagtaccccaagctggagtccgagttcgtgtacggcgactacaaggtgtacgacgtgcggaagatgatcgccaagtccgagcaggagatcggcaaggccaccgccaagtacttcttctactccaacatcatgaacttcttcaagaccgagatcaccctggccaacggcgagatccggaagcggcccctgatcgagaccaacggcgagaccggcgagatcgtgtgggacaagggccgggacttcgccaccgtgcggaaggtgctgtccatgccccaggtgaacatcgtgaagaagaccgaggtgcagaccggcggcttctccaaggagtccatcctgcccaagcggaactccgacaagctgatcgcccggaagaaggactgggaccccaagaagtacggcggcttcgactcccccaccgtggcctactccgtgctggtggtggccaaggtggagaagggcaagtccaagaagctgaagtccgtgaaggagctgctgggcatcaccatcatggagcggtcctccttcgagaagaaccccatcgacttcctggaggccaagggctacaaggaggtgaagaaggacctgatcatcaagctgcccaagtactccctgttcgagctggagaacggccggaagcggatgctggcctccgccggcgagctgcagaagggcaacgagctggccctgccctccaagtacgtgaacttcctgtacctggcctcccactacgagaagctgaagggctcccccgaggacaacgagcagaagcagctgttcgtggagcagcacaagcactacctggacgagatcatcgagcagatctccgagttctccaagcgggtgatcctggccgacgccaacctggacaaggtgctgtccgcctacaacaagcaccgggacaagcccatccgggagcaggccgagaacatcatccacctgttcaccctgaccaacctgggcgcccccgccgccttcaagtacttcgacaccaccatcgaccggaagcggtacacctccaccaaggaggtgctggacgccaccctgatccaccagtccatcaccggcctgtacgagacccggatcgacctgtcccagctgggcggcgacggctccggctcccccaagaagaagcggaaggtggacggctcccccaagaagaagcggaaggtggactccggc

SEQ ID NO: 349 - DNA, 4134 bp, Artificial Sequence
  Synthetic: Cas9 nickase ORF using low A codons of Table 4 (no start or stop codons; suitable for inclusion in fusion protein coding sequence)
gacaagaagtactccatcggcctggccatcggcaccaactccgtgggctgggccgtgatcaccgacgagtacaaggtgccctccaagaagttcaaggtgctgggcaacaccgaccggcactccatcaagaagaacctgatcggcgccctgctgttcgactccggcgagaccgccgaggccacccggctgaagcggaccgcccggcggcggtacacccggcggaagaaccggatctgctacctgcaggagatcttctccaacgagatggccaaggtggacgactccttcttccaccggctggaggagtccttcctggtggaggaggacaagaagcacgagcggcaccccatcttcggcaacatcgtggacgaggtggcctaccacgagaagtaccccaccatctaccacctgcggaagaagctggtggactccaccgacaaggccgacctgcggctgatctacctggccctggcccacatgatcaagttccggggccacttcctgatcgagggcgacctgaaccccgacaactccgacgtggacaagctgttcatccagctggtgcagacctacaaccagctgttcgaggagaaccccatcaacgcctccggcgtggacgccaaggccatcctgtccgcccggctgtccaagtcccggcggctggagaacctgatcgcccagctgcccggcgagaagaagaacggcctgttcggcaacctgatcgccctgtccctgggcctgacccccaacttcaagtccaacttcgacctggccgaggacgccaagctgcagctgtccaaggacacctacgacgacgacctggacaacctgctggcccagatcggcgaccagtacgccgacctgttcctggccgccaagaacctgtccgacgccatcctgctgtccgacatcctgcgggtgaacaccgagatcaccaaggcccccctgtccgcctccatgatcaagcggtacgacgagcaccaccaggacctgaccctgctgaaggccctggtgcggcagcagctgcccgagaagtacaaggagatcttcttcgaccagtccaagaacggctacgccggctacatcgacggcggcgcctcccaggaggagttctacaagttcatcaagcccatcctggagaagatggacggcaccgaggagctgctggtgaagctgaaccgggaggacctgctgcggaagcagcggaccttcgacaacggctccatcccccaccagatccacctgggcgagctgcacgccatcctgcggcggcaggaggacttctaccccttcctgaaggacaaccgggagaagatcgagaagatcctgaccttccggatcccctactacgtgggccccctggcccggggcaactcccggttcgcctggatgacccggaagtccgaggagaccatcaccccctggaacttcgaggaggtggtggacaagggcgcctccgcccagtccttcatcgagcggatgaccaacttcgacaagaacctgcccaacgagaaggtgctgcccaagcactccctgctgtacgagtacttcaccgtgtacaacgagctgaccaaggtgaagtacgtgaccgagggcatgcggaagcccgccttcctgtccggcgagcagaagaaggccatcgtggacctgctgttcaagaccaaccggaaggtgaccgtgaagcagctgaaggaggactacttcaagaagatcgagtgcttcgactccgtggagatctccggcgtggaggaccggttcaacgcctccctgggcacctaccacgacctgctgaagatcatcaaggacaaggacttcctggacaacgaggagaacgaggacatcctggaggacatcgtgctgaccctgaccctgttcgaggaccgggagatgatcgaggagcggctgaagacctacgcccacctgttcgacgacaaggtgatgaagcagctgaagcggcggcggtacaccggctggggccggctgtcccggaagctgatcaacggcatccgggacaagcagtccggcaagaccatcctggacttcctgaagtccgacggcttcgccaaccggaacttcatgcagctgatccacgacgactccctgaccttcaaggaggacatccagaaggcccaggtgtccggccagggcgactccctgcacgagcacatcgccaacctggccggctcccccgccatcaagaagggcatcctgcagaccgtgaaggtggtggacgagctggtgaaggtgatgggccggcacaagcccgagaacatcgtgatcgagatggcccgggagaaccagaccacccagaagggccagaagaactcccgggagcggatgaagcggatcgaggagggcatcaaggagctgggctcccagatcctgaaggagcaccccgtggagaacacccagctgcagaacgagaagctgtacctgtactacctgcagaacggccgggacatgtacgtggaccaggagctggacatcaaccggctgtccgactacgacgtggaccacatcgtgccccagtccttcctgaaggacgactccatcgacaacaaggtgctgacccggtccgacaagaaccggggcaagtccgacaacgtgccctccgaggaggtggtgaagaagatgaagaactactggcggcagctgctgaacgccaagctgatcacccagcggaagttcgacaacctgaccaaggccgagcggggcggcctgtccgagctggacaaggccggcttcatcaagcggcagctggtggagacccggcagatcaccaagcacgtggcccagatcctggactcccggatgaacaccaagtacgacgagaacgacaagctgatccgggaggtgaaggtgatcaccctgaagtccaagctggtgtccgacttccggaaggacttccagttctacaaggtgcgggagatcaacaactaccaccacgcccacgacgcctacctgaacgccgtggtgggcaccgccctgatcaagaagtaccccaagctggagtccgagttcgtgtacggcgactacaaggtgtacgacgtgcggaagatgatcgccaagtccgagcaggagatcggcaaggccaccgccaagtacttcttctactccaacatcatgaacttcttcaagaccgagatcaccctggccaacggcgagatccggaagcggcccctgatcgagaccaacggcgagaccggcgagatcgtgtgggacaagggccgggacttcgccaccgtgcggaaggtgctgtccatgccccaggtgaacatcgtgaagaagaccgaggtgcagaccggcggcttctccaaggagtccatcctgcccaagcggaactccgacaagctgatcgcccggaagaaggactgggaccccaagaagtacggcggcttcgactcccccaccgtggcctactccgtgctggtggtggccaaggtggagaagggcaagtccaagaagctgaagtccgtgaaggagctgctgggcatcaccatcatggagcggtcctccttcgagaagaaccccatcgacttcctggaggccaagggctacaaggaggtgaagaaggacctgatcatcaagctgcccaagtactccctgttcgagctggagaacggccggaagcggatgctggcctccgccggcgagctgcagaagggcaacgagctggccctgccctccaagtacgtgaacttcctgtacctggcctcccactacgagaagctgaagggctcccccgaggacaacgagcagaagcagctgttcgtggagcagcacaagcactacctggacgagatcatcgagcagatctccgagttctccaagcgggtgatcctggccgacgccaacctggacaaggtgctgtccgcctacaacaagcaccgggacaagcccatccgggagcaggccgagaacatcatccacctgttcaccctgaccaacctgggcgcccccgccgccttcaagtacttcgacaccaccatcgaccggaagcggtacacctccaccaaggaggtgctggacgccaccctgatccaccagtccatcaccggcctgtacgagacccggatcgacctgtcccagctgggcggcgacggcggcggctcccccaagaagaagcggaaggtg

SEQ ID NO: 350 - DNA, 4101 bp, Artificial Sequence
  Synthetic: Cas9 nickase ORF using low A codons of Table 4 (no NLS and no start or stop codons; suitable for inclusion in fusion protein coding sequence)
gacaagaagtactccatcggcctggccatcggcaccaactccgtgggctgggccgtgatcaccgacgagtacaaggtgccctccaagaagttcaaggtgctgggcaacaccgaccggcactccatcaagaagaacctgatcggcgccctgctgttcgactccggcgagaccgccgaggccacccggctgaagcggaccgcccggcggcggtacacccggcggaagaaccggatctgctacctgcaggagatcttctccaacgagatggccaaggtggacgactccttcttccaccggctggaggagtccttcctggtggaggaggacaagaagcacgagcggcaccccatcttcggcaacatcgtggacgaggtggcctaccacgagaagtaccccaccatctaccacctgcggaagaagctggtggactccaccgacaaggccgacctgcggctgatctacctggccctggcccacatgatcaagttccggggccacttcctgatcgagggcgacctgaaccccgacaactccgacgtggacaagctgttcatccagctggtgcagacctacaaccagctgttcgaggagaaccccatcaacgcctccggcgtggacgccaaggccatcctgtccgcccggctgtccaagtcccggcggctggagaacctgatcgcccagctgcccggcgagaagaagaacggcctgttcggcaacctgatcgccctgtccctgggcctgacccccaacttcaagtccaacttcgacctggccgaggacgccaagctgcagctgtccaaggacacctacgacgacgacctggacaacctgctggcccagatcggcgaccagtacgccgacctgttcctggccgccaagaacctgtccgacgccatcctgctgtccgacatcctgcgggtgaacaccgagatcaccaaggcccccctgtccgcctccatgatcaagcggtacgacgagcaccaccaggacctgaccctgctgaaggccctggtgcggcagcagctgcccgagaagtacaaggagatcttcttcgaccagtccaagaacggctacgccggctacatcgacggcggcgcctcccaggaggagttctacaagttcatcaagcccatcctggagaagatggacggcaccgaggagctgctggtgaagctgaaccgggaggacctgctgcggaagcagcggaccttcgacaacggctccatcccccaccagatccacctgggcgagctgcacgccatcctgcggcggcaggaggacttctaccccttcctgaaggacaaccgggagaagatcgagaagatcctgaccttccggatcccctactacgtgggccccctggcccggggcaactcccggttcgcctggatgacccggaagtccgaggagaccatcaccccctggaacttcgaggaggtggtggacaagggcgcctccgcccagtccttcatcgagcggatgaccaacttcgacaagaacctgcccaacgagaaggtgctgcccaagcactccctgctgtacgagtacttcaccgtgtacaacgagctgaccaaggtgaagtacgtgaccgagggcatgcggaagcccgccttcctgtccggcgagcagaagaaggccatcgtggacctgctgttcaagaccaaccggaaggtgaccgtgaagcagctgaaggaggactacttcaagaagatcgagtgcttcgactccgtggagatctccggcgtggaggaccggttcaacgcctccctgggcacctaccacgacctgctgaagatcatcaaggacaaggacttcctggacaacgaggagaacgaggacatcctggaggacatcgtgctgaccctgaccctgttcgaggaccgggagatgatcgaggagcggctgaagacctacgcccacctgttcgacgacaaggtgatgaagcagctgaagcggcggcggtacaccggctggggccggctgtcccggaagctgatcaacggcatccgggacaagcagtccggcaagaccatcctggacttcctgaagtccgacggcttcgccaaccggaacttcatgcagctgatccacgacgactccctgaccttcaaggaggacatccagaaggcccaggtgtccggccagggcgactccctgcacgagcacatcgccaacctggccggctcccccgccatcaagaagggcatcctgcagaccgtgaaggtggtggacgagctggtgaaggtgatgggccggcacaagcccgagaacatcgtgatcgagatggcccgggagaaccagaccacccagaagggccagaagaactcccgggagcggatgaagcggatcgaggagggcatcaaggagctgggctcccagatcctgaaggagcaccccgtggagaacacccagctgcagaacgagaagctgtacctgtactacctgcagaacggccgggacatgtacgtggaccaggagctggacatcaaccggctgtccgactacgacgtggaccacatcgtgccccagtccttcctgaaggacgactccatcgacaacaaggtgctgacccggtccgacaagaaccggggcaagtccgacaacgtgccctccgaggaggtggtgaagaagatgaagaactactggcggcagctgctgaacgccaagctgatcacccagcggaagttcgacaacctgaccaaggccgagcggggcggcctgtccgagctggacaaggccggcttcatcaagcggcagctggtggagacccggcagatcaccaagcacgtggcccagatcctggactcccggatgaacaccaagtacgacgagaacgacaagctgatccgggaggtgaaggtgatcaccctgaagtccaagctggtgtccgacttccggaaggacttccagttctacaaggtgcgggagatcaacaactaccaccacgcccacgacgcctacctgaacgccgtggtgggcaccgccctgatcaagaagtaccccaagctggagtccgagttcgtgtacggcgactacaaggtgtacgacgtgcggaagatgatcgccaagtccgagcaggagatcggcaaggccaccgccaagtacttcttctactccaacatcatgaacttcttcaagaccgagatcaccctggccaacggcgagatccggaagcggcccctgatcgagaccaacggcgagaccggcgagatcgtgtgggacaagggccgggacttcgccaccgtgcggaaggtgctgtccatgccccaggtgaacatcgtgaagaagaccgaggtgcagaccggcggcttctccaaggagtccatcctgcccaagcggaactccgacaagctgatcgcccggaagaaggactgggaccccaagaagtacggcggcttcgactcccccaccgtggcctactccgtgctggtggtggccaaggtggagaagggcaagtccaagaagctgaagtccgtgaaggagctgctgggcatcaccatcatggagcggtcctccttcgagaagaaccccatcgacttcctggaggccaagggctacaaggaggtgaagaaggacctgatcatcaagctgcccaagtactccctgttcgagctggagaacggccggaagcggatgctggcctccgccggcgagctgcagaagggcaacgagctggccctgccctccaagtacgtgaacttcctgtacctggcctcccactacgagaagctgaagggctcccccgaggacaacgagcagaagcagctgttcgtggagcagcacaagcactacctggacgagatcatcgagcagatctccgagttctccaagcgggtgatcctggccgacgccaacctggacaaggtgctgtccgcctacaacaagcaccgggacaagcccatccgggagcaggccgagaacatcatccacctgttcaccctgaccaacctgggcgcccccgccgccttcaagtacttcgacaccaccatcgaccggaagcggtacacctccaccaaggaggtgctggacgccaccctgatccaccagtccatcaccggcctgtacgagacccggatcgacctgtcccagctgggcggcgac

SEQ ID NO: 351 - DNA, 4173 bp, Artificial Sequence
  Synthetic: Cas9 nickase ORF using low A codons of Table 4, with two C-terminal NLS sequences (no start or stop codons; suitable for inclusion in fusion protein coding sequence)
gacaagaagtactccatcggcctggccatcggcaccaactccgtgggctgggccgtgatcaccgacgagtacaaggtgccctccaagaagttcaaggtgctgggcaacaccgaccggcactccatcaagaagaacctgatcggcgccctgctgttcgactccggcgagaccgccgaggccacccggctgaagcggaccgcccggcggcggtacacccggcggaagaaccggatctgctacctgcaggagatcttctccaacgagatggccaaggtggacgactccttcttccaccggctggaggagtccttcctggtggaggaggacaagaagcacgagcggcaccccatcttcggcaacatcgtggacgaggtggcctaccacgagaagtaccccaccatctaccacctgcggaagaagctggtggactccaccgacaaggccgacctgcggctgatctacctggccctggcccacatgatcaagttccggggccacttcctgatcgagggcgacctgaaccccgacaactccgacgtggacaagctgttcatccagctggtgcagacctacaaccagctgttcgaggagaaccccatcaacgcctccggcgtggacgccaaggccatcctgtccgcccggctgtccaagtcccggcggctggagaacctgatcgcccagctgcccggcgagaagaagaacggcctgttcggcaacctgatcgccctgtccctgggcctgacccccaacttcaagtccaacttcgacctggccgaggacgccaagctgcagctgtccaaggacacctacgacgacgacctggacaacctgctggcccagatcggcgaccagtacgccgacctgttcctggccgccaagaacctgtccgacgccatcctgctgtccgacatcctgcgggtgaacaccgagatcaccaaggcccccctgtccgcctccatgatcaagcggtacgacgagcaccaccaggacctgaccctgctgaaggccctggtgcggcagcagctgcccgagaagtacaaggagatcttcttcgaccagtccaagaacggctacgccggctacatcgacggcggcgcctcccaggaggagttctacaagttcatcaagcccatcctggagaagatggacggcaccgaggagctgctggtgaagctgaaccgggaggacctgctgcggaagcagcggaccttcgacaacggctccatcccccaccagatccacctgggcgagctgcacgccatcctgcggcggcaggaggacttctaccccttcctgaaggacaaccgggagaagatcgagaagatcctgaccttccggatcccctactacgtgggccccctggcccggggcaactcccggttcgcctggatgacccggaagtccgaggagaccatcaccccctggaacttcgaggaggtggtggacaagggcgcctccgcccagtccttcatcgagcggatgaccaacttcgacaagaacctgcccaacgagaaggtgctgcccaagcactccctgctgtacgagtacttcaccgtgtacaacgagctgaccaaggtgaagtacgtgaccgagggcatgcggaagcccgccttcctgtccggcgagcagaagaaggccatcgtggacctgctgttcaagaccaaccggaaggtgaccgtgaagcagctgaaggaggactacttcaagaagatcgagtgcttcgactccgtggagatctccggcgtggaggaccggttcaacgcctccctgggcacctaccacgacctgctgaagatcatcaaggacaaggacttcctggacaacgaggagaacgaggacatcctggaggacatcgtgctgaccctgaccctgttcgaggaccgggagatgatcgaggagcggctgaagacctacgcccacctgttcgacgacaaggtgatgaagcagctgaagcggcggcggtacaccggctggggccggctgtcccggaagctgatcaacggcatccgggacaagcagtccggcaagaccatcctggacttcctgaagtccgacggcttcgccaaccggaacttcatgcagctgatccacgacgactccctgaccttcaaggaggacatccagaaggcccaggtgtccggccagggcgactccctgcacgagcacatcgccaacctggccggctcccccgccatcaagaagggcatcctgcagaccgtgaaggtggtggacgagctggtgaaggtgatgggccggcacaagcccgagaacatcgtgatcgagatggcccgggagaaccagaccacccagaagggccagaagaactcccgggagcggatgaagcggatcgaggagggcatcaaggagctgggctcccagatcctgaaggagcaccccgtggagaacacccagctgcagaacgagaagctgtacctgtactacctgcagaacggccgggacatgtacgtggaccaggagctggacatcaaccggctgtccgactacgacgtggaccacatcgtgccccagtccttcctgaaggacgactccatcgacaacaaggtgctgacccggtccgacaagaaccggggcaagtccgacaacgtgccctccgaggaggtggtgaagaagatgaagaactactggcggcagctgctgaacgccaagctgatcacccagcggaagttcgacaacctgaccaaggccgagcggggcggcctgtccgagctggacaaggccggcttcatcaagcggcagctggtggagacccggcagatcaccaagcacgtggcccagatcctggactcccggatgaacaccaagtacgacgagaacgacaagctgatccgggaggtgaaggtgatcaccctgaagtccaagctggtgtccgacttccggaaggacttccagttctacaaggtgcgggagatcaacaactaccaccacgcccacgacgcctacctgaacgccgtggtgggcaccgccctgatcaagaagtaccccaagctggagtccgagttcgtgtacggcgactacaaggtgtacgacgtgcggaagatgatcgccaagtccgagcaggagatcggcaaggccaccgccaagtacttcttctactccaacatcatgaacttcttcaagaccgagatcaccctggccaacggcgagatccggaagcggcccctgatcgagaccaacggcgagaccggcgagatcgtgtgggacaagggccgggacttcgccaccgtgcggaaggtgctgtccatgccccaggtgaacatcgtgaagaagaccgaggtgcagaccggcggcttctccaaggagtccatcctgcccaagcggaactccgacaagctgatcgcccggaagaaggactgggaccccaagaagtacggcggcttcgactcccccaccgtggcctactccgtgctggtggtggccaaggtggagaagggcaagtccaagaagctgaagtccgtgaaggagctgctgggcatcaccatcatggagcggtcctccttcgagaagaaccccatcgacttcctggaggccaagggctacaaggaggtgaagaaggacctgatcatcaagctgcccaagtactccctgttcgagctggagaacggccggaagcggatgctggcctccgccggcgagctgcagaagggcaacgagctggccctgccctccaagtacgtgaacttcctgtacctggcctcccactacgagaagctgaagggctcccccgaggacaacgagcagaagcagctgttcgtggagcagcacaagcactacctggacgagatcatcgagcagatctccgagttctccaagcgggtgatcctggccgacgccaacctggacaaggtgctgtccgcctacaacaagcaccgggacaagcccatccgggagcaggccgagaacatcatccacctgttcaccctgaccaacctgggcgcccccgccgccttcaagtacttcgacaccaccatcgaccggaagcggtacacctccaccaaggaggtgctggacgccaccctgatccaccagtccatcaccggcctgtacgagacccggatcgacctgtcccagctgggcggcgacggctccggctcccccaagaagaagcggaaggtggacggctcccccaagaagaagcggaaggtggactccggc

SEQ ID NO: 352 - DNA, 4134 bp, Artificial Sequence
  Synthetic: dCas9 ORF using low A codons of Table 4 (no start or stop codons; suitable for inclusion in fusion protein coding sequence)
gacaagaagtactccatcggcctggccatcggcaccaactccgtgggctgggccgtgatcaccgacgagtacaaggtgccctccaagaagttcaaggtgctgggcaacaccgaccggcactccatcaagaagaacctgatcggcgccctgctgttcgactccggcgagaccgccgaggccacccggctgaagcggaccgcccggcggcggtacacccggcggaagaaccggatctgctacctgcaggagatcttctccaacgagatggccaaggtggacgactccttcttccaccggctggaggagtccttcctggtggaggaggacaagaagcacgagcggcaccccatcttcggcaacatcgtggacgaggtggcctaccacgagaagtaccccaccatctaccacctgcggaagaagctggtggactccaccgacaaggccgacctgcggctgatctacctggccctggcccacatgatcaagttccggggccacttcctgatcgagggcgacctgaaccccgacaactccgacgtggacaagctgttcatccagctggtgcagacctacaaccagctgttcgaggagaaccccatcaacgcctccggcgtggacgccaaggccatcctgtccgcccggctgtccaagtcccggcggctggagaacctgatcgcccagctgcccggcgagaagaagaacggcctgttcggcaacctgatcgccctgtccctgggcctgacccccaacttcaagtccaacttcgacctggccgaggacgccaagctgcagctgtccaaggacacctacgacgacgacctggacaacctgctggcccagatcggcgaccagtacgccgacctgttcctggccgccaagaacctgtccgacgccatcctgctgtccgacatcctgcgggtgaacaccgagatcaccaaggcccccctgtccgcctccatgatcaagcggtacgacgagcaccaccaggacctgaccctgctgaaggccctggtgcggcagcagctgcccgagaagtacaaggagatcttcttcgaccagtccaagaacggctacgccggctacatcgacggcggcgcctcccaggaggagttctacaagttcatcaagcccatcctggagaagatggacggcaccgaggagctgctggtgaagctgaaccgggaggacctgctgcggaagcagcggaccttcgacaacggctccatcccccaccagatccacctgggcgagctgcacgccatcctgcggcggcaggaggacttctaccccttcctgaaggacaaccgggagaagatcgagaagatcctgaccttccggatcccctactacgtgggccccctggcccggggcaactcccggttcgcctggatgacccggaagtccgaggagaccatcaccccctggaacttcgaggaggtggtggacaagggcgcctccgcccagtccttcatcgagcggatgaccaacttcgacaagaacctgcccaacgagaaggtgctgcccaagcactccctgctgtacgagtacttcaccgtgtacaacgagctgaccaaggtgaagtacgtgaccgagggcatgcggaagcccgccttcctgtccggcgagcagaagaaggccatcgtggacctgctgttcaagaccaaccggaaggtgaccgtgaagcagctgaaggaggactacttcaagaagatcgagtgcttcgactccgtggagatctccggcgtggaggaccggttcaacgcctccctgggcacctaccacgacctgctgaagatcatcaaggacaaggacttcctggacaacgaggagaacgaggacatcctggaggacatcgtgctgaccctgaccctgttcgaggaccgggagatgatcgaggagcggctgaagacctacgcccacctgttcgacgacaaggtgatgaagcagctgaagcggcggcggtacaccggctggggccggctgtcccggaagctgatcaacggcatccgggacaagcagtccggcaagaccatcctggacttcctgaagtccgacggcttcgccaaccggaacttcatgcagctgatccacgacgactccctgaccttcaaggaggacatccagaaggcccaggtgtccggccagggcgactccctgcacgagcacatcgccaacctggccggctcccccgccatcaagaagggcatcctgcagaccgtgaaggtggtggacgagctggtgaaggtgatgggccggcacaagcccgagaacatcgtgatcgagatggcccgggagaaccagaccacccagaagggccagaagaactcccgggagcggatgaagcggatcgaggagggcatcaaggagctgggctcccagatcctgaaggagcaccccgtggagaacacccagctgcagaacgagaagctgtacctgtactacctgcagaacggccgggacatgtacgtggaccaggagctggacatcaaccggctgtccgactacgacgtggacgccatcgtgccccagtccttcctgaaggacgactccatcgacaacaaggtgctgacccggtccgacaagaaccggggcaagtccgacaacgtgccctccgaggaggtggtgaagaagatgaagaactactggcggcagctgctgaacgccaagctgatcacccagcggaagttcgacaacctgaccaaggccgagcggggcggcctgtccgagctggacaaggccggcttcatcaagcggcagctggtggagacccggcagatcaccaagcacgtggcccagatcctggactcccggatgaacaccaagtacgacgagaacgacaagctgatccgggaggtgaaggtgatcaccctgaagtccaagctggtgtccgacttccggaaggacttccagttctacaaggtgcgggagatcaacaactaccaccacgcccacgacgcctacctgaacgccgtggtgggcaccgccctgatcaagaagtaccccaagctggagtccgagttcgtgtacggcgactacaaggtgtacgacgtgcggaagatgatcgccaagtccgagcaggagatcggcaaggccaccgccaagtacttcttctactccaacatcatgaacttcttcaagaccgagatcaccctggccaacggcgagatccggaagcggcccctgatcgagaccaacggcgagaccggcgagatcgtgtgggacaagggccgggacttcgccaccgtgcggaaggtgctgtccatgccccaggtgaacatcgtgaagaagaccgaggtgcagaccggcggcttctccaaggagtccatcctgcccaagcggaactccgacaagctgatcgcccggaagaaggactgggaccccaagaagtacggcggcttcgactcccccaccgtggcctactccgtgctggtggtggccaaggtggagaagggcaagtccaagaagctgaagtccgtgaaggagctgctgggcatcaccatcatggagcggtcctccttcgagaagaaccccatcgacttcctggaggccaagggctacaaggaggtgaagaaggacctgatcatcaagctgcccaagtactccctgttcgagctggagaacggccggaagcggatgctggcctccgccggcgagctgcagaagggcaacgagctggccctgccctccaagtacgtgaacttcctgtacctggcctcccactacgagaagctgaagggctcccccgaggacaacgagcagaagcagctgttcgtggagcagcacaagcactacctggacgagatcatcgagcagatctccgagttctccaagcgggtgatcctggccgacgccaacctggacaaggtgctgtccgcctacaacaagcaccgggacaagcccatccgggagcaggccgagaacatcatccacctgttcaccctgaccaacctgggcgcccccgccgccttcaagtacttcgacaccaccatcgaccggaagcggtacacctccaccaaggaggtgctggacgccaccctgatccaccagtccatcaccggcctgtacgagacccggatcgacctgtcccagctgggcggcgacggcggcggctcccccaagaagaagcggaaggtg

SEQ ID NO: 353 - DNA, 4101 bp, Artificial Sequence
  Synthetic: dCas9 ORF using low A codons of Table 4 (no NLS and no start or stop codons; suitable for inclusion in fusion protein coding sequence)
gacaagaagtactccatcggcctggccatcggcaccaactccgtgggctgggccgtgatcaccgacgagtacaaggtgccctccaagaagttcaaggtgctgggcaacaccgaccggcactccatcaagaagaacctgatcggcgccctgctgttcgactccggcgagaccgccgaggccacccggctgaagcggaccgcccggcggcggtacacccggcggaagaaccggatctgctacctgcaggagatcttctccaacgagatggccaaggtggacgactccttcttccaccggctggaggagtccttcctggtggaggaggacaagaagcacgagcggcaccccatcttcggcaacatcgtggacgaggtggcctaccacgagaagtaccccaccatctaccacctgcggaagaagctggtggactccaccgacaaggccgacctgcggctgatctacctggccctggcccacatgatcaagttccggggccacttcctgatcgagggcgacctgaaccccgacaactccgacgtggacaagctgttcatccagctggtgcagacctacaaccagctgttcgaggagaaccccatcaacgcctccggcgtggacgccaaggccatcctgtccgcccggctgtccaagtcccggcggctggagaacctgatcgcccagctgcccggcgagaagaagaacggcctgttcggcaacctgatcgccctgtccctgggcctgacccccaacttcaagtccaacttcgacctggccgaggacgccaagctgcagctgtccaaggacacctacgacgacgacctggacaacctgctggcccagatcggcgaccagtacgccgacctgttcctggccgccaagaacctgtccgacgccatcctgctgtccgacatcctgcgggtgaacaccgagatcaccaaggcccccctgtccgcctccatgatcaagcggtacgacgagcaccaccaggacctgaccctgctgaaggccctggtgcggcagcagctgcccgagaagtacaaggagatcttcttcgaccagtccaagaacggctacgccggctacatcgacggcggcgcctcccaggaggagttctacaagttcatcaagcccatcctggagaagatggacggcaccgaggagctgctggtgaagctgaaccgggaggacctgctgcggaagcagcggaccttcgacaacggctccatcccccaccagatccacctgggcgagctgcacgccatcctgcggcggcaggaggacttctaccccttcctgaaggacaaccgggagaagatcgagaagatcctgaccttccggatcccctactacgtgggccccctggcccggggcaactcccggttcgcctggatgacccggaagtccgaggagaccatcaccccctggaacttcgaggaggtggtggacaagggcgcctccgcccagtccttcatcgagcggatgaccaacttcgacaagaacctgcccaacgagaaggtgctgcccaagcactccctgctgtacgagtacttcaccgtgtacaacgagctgaccaaggtgaagtacgtgaccgagggcatgcggaagcccgccttcctgtccggcgagcagaagaaggccatcgtggacctgctgttcaagaccaaccggaaggtgaccgtgaagcagctgaaggaggactacttcaagaagatcgagtgcttcgactccgtggagatctccggcgtggaggaccggttcaacgcctccctgggcacctaccacgacctgctgaagatcatcaaggacaaggacttcctggacaacgaggagaacgaggacatcctggaggacatcgtgctgaccctgaccctgttcgaggaccgggagatgatcgaggagcggctgaagacctacgcccacctgttcgacgacaaggtgatgaagcagctgaagcggcggcggtacaccggctggggccggctgtcccggaagctgatcaacggcatccgggacaagcagtccggcaagaccatcctggacttcctgaagtccgacggcttcgccaaccggaacttcatgcagctgatccacgacgactccctgaccttcaaggaggacatccagaaggcccaggtgtccggccagggcgactccctgcacgagcacatcgccaacctggccggctcccccgccatcaagaagggcatcctgcagaccgtgaaggtggtggacgagctggtgaaggtgatgggccggcacaagcccgagaacatcgtgatcgagatggcccgggagaaccagaccacccagaagggccagaagaactcccgggagcggatgaagcggatcgaggagggcatcaaggagctgggctcccagatcctgaaggagcaccccgtggagaacacccagctgcagaacgagaagctgtacctgtactacctgcagaacggccgggacatgtacgtggaccaggagctggacatcaaccggctgtccgactacgacgtggacgccatcgtgccccagtccttcctgaaggacgactccatcgacaacaaggtgctgacccggtccgacaagaaccggggcaagtccgacaacgtgccctccgaggaggtggtgaagaagatgaagaactactggcggcagctgctgaacgccaagctgatcacccagcggaagttcgacaacctgaccaaggccgagcggggcggcctgtccgagctggacaaggccggcttcatcaagcggcagctggtggagacccggcagatcaccaagcacgtggcccagatcctggactcccggatgaacaccaagtacgacgagaacgacaagctgatccgggaggtgaaggtgatcaccctgaagtccaagctggtgtccgacttccggaaggacttccagttctacaaggtgcgggagatcaacaactaccaccacgcccacgacgcctacctgaacgccgtggtgggcaccgccctgatcaagaagtaccccaagctggagtccgagttcgtgtacggcgactacaaggtgtacgacgtgcggaagatgatcgccaagtccgagcaggagatcggcaaggccaccgccaagtacttcttctactccaacatcatgaacttcttcaagaccgagatcaccctggccaacggcgagatccggaagcggcccctgatcgagaccaacggcgagaccggcgagatcgtgtgggacaagggccgggacttcgccaccgtgcggaaggtgctgtccatgccccaggtgaacatcgtgaagaagaccgaggtgcagaccggcggcttctccaaggagtccatcctgcccaagcggaactccgacaagctgatcgcccggaagaaggactgggaccccaagaagtacggcggcttcgactcccccaccgtggcctactccgtgctggtggtggccaaggtggagaagggcaagtccaagaagctgaagtccgtgaaggagctgctgggcatcaccatcatggagcggtcctccttcgagaagaaccccatcgacttcctggaggccaagggctacaaggaggtgaagaaggacctgatcatcaagctgcccaagtactccctgttcgagctggagaacggccggaagcggatgctggcctccgccggcgagctgcagaagggcaacgagctggccctgccctccaagtacgtgaacttcctgtacctggcctcccactacgagaagctgaagggctcccccgaggacaacgagcagaagcagctgttcgtggagcagcacaagcactacctggacgagatcatcgagcagatctccgagttctccaagcgggtgatcctggccgacgccaacctggacaaggtgctgtccgcctacaacaagcaccgggacaagcccatccgggagcaggccgagaacatcatccacctgttcaccctgaccaacctgggcgcccccgccgccttcaagtacttcgacaccaccatcgaccggaagcggtacacctccaccaaggaggtgctggacgccaccctgatccaccagtccatcaccggcctgtacgagacccggatcgacctgtcccagctgggcggcgac

SEQ ID NO: 354 - DNA, 4173 bp, Artificial Sequence
  Synthetic: dCas9 ORF using low A codons of Table 4, with two C-terminal NLS sequences (no start or stop codons; suitable for inclusion in fusion protein coding sequence)
gacaagaagtactccatcggcctggccatcggcaccaactccgtgggctgggccgtgatcaccgacgagtacaaggtgccctccaagaagttcaaggtgctgggcaacaccgaccggcactccatcaagaagaacctgatcggcgccctgctgttcgactccggcgagaccgccgaggccacccggctgaagcggaccgcccggcggcggtacacccggcggaagaaccggatctgctacctgcaggagatcttctccaacgagatggccaaggtggacgactccttcttccaccggctggaggagtccttcctggtggaggaggacaagaagcacgagcggcaccccatcttcggcaacatcgtggacgaggtggcctaccacgagaagtaccccaccatctaccacctgcggaagaagctggtggactccaccgacaaggccgacctgcggctgatctacctggccctggcccacatgatcaagttccggggccacttcctgatcgagggcgacctgaaccccgacaactccgacgtggacaagctgttcatccagctggtgcagacctacaaccagctgttcgaggagaaccccatcaacgcctccggcgtggacgccaaggccatcctgtccgcccggctgtccaagtcccggcggctggagaacctgatcgcccagctgcccggcgagaagaagaacggcctgttcggcaacctgatcgccctgtccctgggcctgacccccaacttcaagtccaacttcgacctggccgaggacgccaagctgcagctgtccaaggacacctacgacgacgacctggacaacctgctggcccagatcggcgaccagtacgccgacctgttcctggccgccaagaacctgtccgacgccatcctgctgtccgacatcctgcgggtgaacaccgagatcaccaaggcccccctgtccgcctccatgatcaagcggtacgacgagcaccaccaggacctgaccctgctgaaggccctggtgcggcagcagctgcccgagaagtacaaggagatcttcttcgaccagtccaagaacggctacgccggctacatcgacggcggcgcctcccaggaggagttctacaagttcatcaagcccatcctggagaagatggacggcaccgaggagctgctggtgaagctgaaccgggaggacctgctgcggaagcagcggaccttcgacaacggctccatcccccaccagatccacctgggcgagctgcacgccatcctgcggcggcaggaggacttctaccccttcctgaaggacaaccgggagaagatcgagaagatcctgaccttccggatcccctactacgtgggccccctggcccggggcaactcccggttcgcctggatgacccggaagtccgaggagaccatcaccccctggaacttcgaggaggtggtggacaagggcgcctccgcccagtccttcatcgagcggatgaccaacttcgacaagaacctgcccaacgagaaggtgctgcccaagcactccctgctgtacgagtacttcaccgtgtacaacgagctgaccaaggtgaagtacgtgaccgagggcatgcggaagcccgccttcctgtccggcgagcagaagaaggccatcgtggacctgctgttcaagaccaaccggaaggtgaccgtgaagcagctgaaggaggactacttcaagaagatcgagtgcttcgactccgtggagatctccggcgtggaggaccggttcaacgcctccctgggcacctaccacgacctgctgaagatcatcaaggacaaggacttcctggacaacgaggagaacgaggacatcctggaggacatcgtgctgaccctgaccctgttcgaggaccgggagatgatcgaggagcggctgaagacctacgcccacctgttcgacgacaaggtgatgaagcagctgaagcggcggcggtacaccggctggggccggctgtcccggaagctgatcaacggcatccgggacaagcagtccggcaagaccatcctggacttcctgaagtccgacggcttcgccaaccggaacttcatgcagctgatccacgacgactccctgaccttcaaggaggacatccagaaggcccaggtgtccggccagggcgactccctgcacgagcacatcgccaacctggccggctcccccgccatcaagaagggcatcctgcagaccgtgaaggtggtggacgagctggtgaaggtgatgggccggcacaagcccgagaacatcgtgatcgagatggcccgggagaaccagaccacccagaagggccagaagaactcccgggagcggatgaagcggatcgaggagggcatcaaggagctgggctcccagatcctgaaggagcaccccgtggagaacacccagctgcagaacgagaagctgtacctgtactacctgcagaacggccgggacatgtacgtggaccaggagctggacatcaaccggctgtccgactacgacgtggacgccatcgtgccccagtccttcctgaaggacgactccatcgacaacaaggtgctgacccggtccgacaagaaccggggcaagtccgacaacgtgccctccgaggaggtggtgaagaagatgaagaactactggcggcagctgctgaacgccaagctgatcacccagcggaagttcgacaacctgaccaaggccgagcggggcggcctgtccgagctggacaaggccggcttcatcaagcggcagctggtggagacccggcagatcaccaagcacgtggcccagatcctggactcccggatgaacaccaagtacgacgagaacgacaagctgatccgggaggtgaaggtgatcaccctgaagtccaagctggtgtccgacttccggaaggacttccagttctacaaggtgcgggagatcaacaactaccaccacgcccacgacgcctacctgaacgccgtggtgggcaccgccctgatcaagaagtaccccaagctggagtccgagttcgtgtacggcgactacaaggtgtacgacgtgcggaagatgatcgccaagtccgagcaggagatcggcaaggccaccgccaagtacttcttctactccaacatcatgaacttcttcaagaccgagatcaccctggccaacggcgagatccggaagcggcccctgatcgagaccaacggcgagaccggcgagatcgtgtgggacaagggccgggacttcgccaccgtgcggaaggtgctgtccatgccccaggtgaacatcgtgaagaagaccgaggtgcagaccggcggcttctccaaggagtccatcctgcccaagcggaactccgacaagctgatcgcccggaagaaggactgggaccccaagaagtacggcggcttcgactcccccaccgtggcctactccgtgctggtggtggccaaggtggagaagggcaagtccaagaagctgaagtccgtgaaggagctgctgggcatcaccatcatggagcggtcctccttcgagaagaaccccatcgacttcctggaggccaagggctacaaggaggtgaagaaggacctgatcatcaagctgcccaagtactccctgttcgagctggagaacggccggaagcggatgctggcctccgccggcgagctgcagaagggcaacgagctggccctgccctccaagtacgtgaacttcctgtacctggcctcccactacgagaagctgaagggctcccccgaggacaacgagcagaagcagctgttcgtggagcagcacaagcactacctggacgagatcatcgagcagatctccgagttctccaagcgggtgatcctggccgacgccaacctggacaaggtgctgtccgcctacaacaagcaccgggacaagcccatccgggagcaggccgagaacatcatccacctgttcaccctgaccaacctgggcgcccccgccgccttcaagtacttcgacaccaccatcgaccggaagcggtacacctccaccaaggaggtgctggacgccaccctgatccaccagtccatcaccggcctgtacgagacccggatcgacctgtcccagctgggcggcgacggctccggctcccccaagaagaagcggaaggtggacggctcccccaagaagaagcggaaggtggactccggc

SEQ ID NO: 355 - DNA, 4173 bp, Artificial Sequence
  Synthetic: Cas9 ORF using low A/U codons of Table 4, with two C-terminal NLS sequences (no start or stop codons; suitable for inclusion in fusion protein coding sequence)
gacaagaagtacagcatcggcctggacatcggcaccaacagcgtgggctgggccgtgatcaccgacgagtacaaggtgcccagcaagaagttcaaggtgctgggcaacaccgaccggcacagcatcaagaagaacctgatcggcgccctgctgttcgacagcggcgagaccgccgaggccacccggctgaagcggaccgcccggcggcggtacacccggcggaagaaccggatctgctacctgcaggagatcttcagcaacgagatggccaaggtggacgacagcttcttccaccggctggaggagagcttcctggtggaggaggacaagaagcacgagcggcaccccatcttcggcaacatcgtggacgaggtggcctaccacgagaagtaccccaccatctaccacctgcggaagaagctggtggacagcaccgacaaggccgacctgcggctgatctacctggccctggcccacatgatcaagttccggggccacttcctgatcgagggcgacctgaaccccgacaacagcgacgtggacaagctgttcatccagctggtgcagacctacaaccagctgttcgaggagaaccccatcaacgccagcggcgtggacgccaaggccatcctgagcgcccggctgagcaagagccggcggctggagaacctgatcgcccagctgcccggcgagaagaagaacggcctgttcggcaacctgatcgccctgagcctgggcctgacccccaacttcaagagcaacttcgacctggccgaggacgccaagctgcagctgagcaaggacacctacgacgacgacctggacaacctgctggcccagatcggcgaccagtacgccgacctgttcctggccgccaagaacctgagcgacgccatcctgctgagcgacatcctgcgggtgaacaccgagatcaccaaggcccccctgagcgccagcatgatcaagcggtacgacgagcaccaccaggacctgaccctgctgaaggccctggtgcggcagcagctgcccgagaagtacaaggagatcttcttcgaccagagcaagaacggctacgccggctacatcgacggcggcgccagccaggaggagttctacaagttcatcaagcccatcctggagaagatggacggcaccgaggagctgctggtgaagctgaaccgggaggacctgctgcggaagcagcggaccttcgacaacggcagcatcccccaccagatccacctgggcgagctgcacgccatcctgcggcggcaggaggacttctaccccttcctgaaggacaaccgggagaagatcgagaagatcctgaccttccggatcccctactacgtgggccccctggcccggggcaacagccggttcgcctggatgacccggaagagcgaggagaccatcaccccctggaacttcgaggaggtggtggacaagggcgccagcgcccagagcttcatcgagcggatgaccaacttcgacaagaacctgcccaacgagaaggtgctgcccaagcacagcctgctgtacgagtacttcaccgtgtacaacgagctgaccaaggtgaagtacgtgaccgagggcatgcggaagcccgccttcctgagcggcgagcagaagaaggccatcgtggacctgctgttcaagaccaaccggaaggtgaccgtgaagcagctgaaggaggactacttcaagaagatcgagtgcttcgacagcgtggagatcagcggcgtggaggaccggttcaacgccagcctgggcacctaccacgacctgctgaagatcatcaaggacaaggacttcctggacaacgaggagaacgaggacatcctggaggacatcgtgctgaccctgaccctgttcgaggaccgggagatgatcgaggagcggctgaagacctacgcccacctgttcgacgacaaggtgatgaagcagctgaagcggcggcggtacaccggctggggccggctgagccggaagctgatcaacggcatccgggacaagcagagcggcaagaccatcctggacttcctgaagagcgacggcttcgccaaccggaacttcatgcagctgatccacgacgacagcctgaccttcaaggaggacatccagaaggcccaggtgagcggccagggcgacagcctgcacgagcacatcgccaacctggccggcagccccgccatcaagaagggcatcctgcagaccgtgaaggtggtggacgagctggtgaaggtgatgggccggcacaagcccgagaacatcgtgatcgagatggcccgggagaaccagaccacccagaagggccagaagaacagccgggagcggatgaagcggatcgaggagggcatcaaggagctgggcagccagatcctgaaggagcaccccgtggagaacacccagctgcagaacgagaagctgtacctgtactacctgcagaacggccgggacatgtacgtggaccaggagctggacatcaaccggctgagcgactacgacgtggaccacatcgtgccccagagcttcctgaaggacgacagcatcgacaacaaggtgctgacccggagcgacaagaaccggggcaagagcgacaacgtgcccagcgaggaggtggtgaagaagatgaagaactactggcggcagctgctgaacgccaagctgatcacccagcggaagttcgacaacctgaccaaggccgagcggggcggcctgagcgagctggacaaggccggcttcatcaagcggcagctggtggagacccggcagatcaccaagcacgtggcccagatcctggacagccggatgaacaccaagtacgacgagaacgacaagctgatccgggaggtgaaggtgatcaccctgaagagcaagctggtgagcgacttccggaaggacttccagttctacaaggtgcgggagatcaacaactaccaccacgcccacgacgcctacctgaacgccgtggtgggcaccgccctgatcaagaagtaccccaagctggagagcgagttcgtgtacggcgactacaaggtgtacgacgtgcggaagatgatcgccaagagcgagcaggagatcggcaaggccaccgccaagtacttcttctacagcaacatcatgaacttcttcaagaccgagatcaccctggccaacggcgagatccggaagcggcccctgatcgagaccaacggcgagaccggcgagatcgtgtgggacaagggccgggacttcgccaccgtgcggaaggtgctgagcatgccccaggtgaacatcgtgaagaagaccgaggtgcagaccggcggcttcagcaaggagagcatcctgcccaagcggaacagcgacaagctgatcgcccggaagaaggactgggaccccaagaagtacggcggcttcgacagccccaccgtggcctacagcgtgctggtggtggccaaggtggagaagggcaagagcaagaagctgaagagcgtgaaggagctgctgggcatcaccatcatggagcggagcagcttcgagaagaaccccatcgacttcctggaggccaagggctacaaggaggtgaagaaggacctgatcatcaagctgcccaagtacagcctgttcgagctggagaacggccggaagcggatgctggccagcgccggcgagctgcagaagggcaacgagctggccctgcccagcaagtacgtgaacttcctgtacctggccagccactacgagaagctgaagggcagccccgaggacaacgagcagaagcagctgttcgtggagcagcacaagcactacctggacgagatcatcgagcagatcagcgagttcagcaagcgggtgatcctggccgacgccaacctggacaaggtgctgagcgcctacaacaagcaccgggacaagcccatccgggagcaggccgagaacatcatccacctgttcaccctgaccaacctgggcgcccccgccgccttcaagtacttcgacaccaccatcgaccggaagcggtacaccagcaccaaggaggtgctggacgccaccctgatccaccagagcatcaccggcctgtacgagacccggatcgacctgagccagctgggcggcgacggcagcggcagccccaagaagaagcggaaggtggacggcagccccaagaagaagcggaaggtggacagcggc

SEQ ID NO: 356 - DNA, 4101 bp, Artificial Sequence
  Synthetic: Cas9 ORF using low A/U codons of Table 4 (no NLS and no start or stop codons; suitable for inclusion in fusion protein coding sequence)
gacaagaagtacagcatcggcctggacatcggcaccaacagcgtgggctgggccgtgatcaccgacgagtacaaggtgcccagcaagaagttcaaggtgctgggcaacaccgaccggcacagcatcaagaagaacctgatcggcgccctgctgttcgacagcggcgagaccgccgaggccacccggctgaagcggaccgcccggcggcggtacacccggcggaagaaccggatctgctacctgcaggagatcttcagcaacgagatggccaaggtggacgacagcttcttccaccggctggaggagagcttcctggtggaggaggacaagaagcacgagcggcaccccatcttcggcaacatcgtggacgaggtggcctaccacgagaagtaccccaccatctaccacctgcggaagaagctggtggacagcaccgacaaggccgacctgcggctgatctacctggccctggcccacatgatcaagttccggggccacttcctgatcgagggcgacctgaaccccgacaacagcgacgtggacaagctgttcatccagctggtgcagacctacaaccagctgttcgaggagaaccccatcaacgccagcggcgtggacgccaaggccatcctgagcgcccggctgagcaagagccggcggctggagaacctgatcgcccagctgcccggcgagaagaagaacggcctgttcggcaacctgatcgccctgagcctgggcctgacccccaacttcaagagcaacttcgacctggccgaggacgccaagctgcagctgagcaaggacacctacgacgacgacctggacaacctgctggcccagatcggcgaccagtacgccgacctgttcctggccgccaagaacctgagcgacgccatcctgctgagcgacatcctgcgggtgaacaccgagatcaccaaggcccccctgagcgccagcatgatcaagcggtacgacgagcaccaccaggacctgaccctgctgaaggccctggtgcggcagcagctgcccgagaagtacaaggagatcttcttcgaccagagcaagaacggctacgccggctacatcgacggcggcgccagccaggaggagttctacaagttcatcaagcccatcctggagaagatggacggcaccgaggagctgctggtgaagctgaaccgggaggacctgctgcggaagcagcggaccttcgacaacggcagcatcccccaccagatccacctgggcgagctgcacgccatcctgcggcggcaggaggacttctaccccttcctgaaggacaaccgggagaagatcgagaagatcctgaccttccggatcccctactacgtgggccccctggcccggggcaacagccggttcgcctggatgacccggaagagcgaggagaccatcaccccctggaacttcgaggaggtggtggacaagggcgccagcgcccagagcttcatcgagcggatgaccaacttcgacaagaacctgcccaacgagaaggtgctgcccaagcacagcctgctgtacgagtacttcaccgtgtacaacgagctgaccaaggtgaagtacgtgaccgagggcatgcggaagcccgccttcctgagcggcgagcagaagaaggccatcgtggacctgctgttcaagaccaaccggaaggtgaccgtgaagcagctgaaggaggactacttcaagaagatcgagtgcttcgacagcgtggagatcagcggcgtggaggaccggttcaacgccagcctgggcacctaccacgacctgctgaagatcatcaaggacaaggacttcctggacaacgaggagaacgaggacatcctggaggacatcgtgctgaccctgaccctgttcgaggaccgggagatgatcgaggagcggctgaagacctacgcccacctgttcgacgacaaggtgatgaagcagctgaagcggcggcggtacaccggctggggccggctgagccggaagctgatcaacggcatccgggacaagcagagcggcaagaccatcctggacttcctgaagagcgacggcttcgccaaccggaacttcatgcagctgatccacgacgacagcctgaccttcaaggaggacatccagaaggcccaggtgagcggccagggcgacagcctgcacgagcacatcgccaacctggccggcagccccgccatcaagaagggcatcctgcagaccgtgaaggtggtggacgagctggtgaaggtgatgggccggcacaagcccgagaacatcgtgatcgagatggcccgggagaaccagaccacccagaagggccagaagaacagccgggagcggatgaagcggatcgaggagggcatcaaggagctgggcagccagatcctgaaggagcaccccgtggagaacacccagctgcagaacgagaagctgtacctgtactacctgcagaacggccgggacatgtacgtggaccaggagctggacatcaaccggctgagcgactacgacgtggaccacatcgtgccccagagcttcctgaaggacgacagcatcgacaacaaggtgctgacccggagcgacaagaaccggggcaagagcgacaacgtgcccagcgaggaggtggtgaagaagatgaagaactactggcggcagctgctgaacgccaagctgatcacccagcggaagttcgacaacctgaccaaggccgagcggggcggcctgagcgagctggacaaggccggcttcatcaagcggcagctggtggagacccggcagatcaccaagcacgtggcccagatcctggacagccggatgaacaccaagtacgacgagaacgacaagctgatccgggaggtgaaggtgatcaccctgaagagcaagctggtgagcgacttccggaaggacttccagttctacaaggtgcgggagatcaacaactaccaccacgcccacgacgcctacctgaacgccgtggtgggcaccgccctgatcaagaagtaccccaagctggagagcgagttcgtgtacggcgactacaaggtgtacgacgtgcggaagatgatcgccaagagcgagcaggagatcggcaaggccaccgccaagtacttcttctacagcaacatcatgaacttcttcaagaccgagatcaccctggccaacggcgagatccggaagcggcccctgatcgagaccaacggcgagaccggcgagatcgtgtgggacaagggccgggacttcgccaccgtgcggaaggtgctgagcatgccccaggtgaacatcgtgaagaagaccgaggtgcagaccggcggcttcagcaaggagagcatcctgcccaagcggaacagcgacaagctgatcgcccggaagaaggactgggaccccaagaagtacggcggcttcgacagccccaccgtggcctacagcgtgctggtggtggccaaggtggagaagggcaagagcaagaagctgaagagcgtgaaggagctgctgggcatcaccatcatggagcggagcagcttcgagaagaaccccatcgacttcctggaggccaagggctacaaggaggtgaagaaggacctgatcatcaagctgcccaagtacagcctgttcgagctggagaacggccggaagcggatgctggccagcgccggcgagctgcagaagggcaacgagctggccctgcccagcaagtacgtgaacttcctgtacctggccagccactacgagaagctgaagggcagccccgaggacaacgagcagaagcagctgttcgtggagcagcacaagcactacctggacgagatcatcgagcagatcagcgagttcagcaagcgggtgatcctggccgacgccaacctggacaaggtgctgagcgcctacaacaagcaccgggacaagcccatccgggagcaggccgagaacatcatccacctgttcaccctgaccaacctgggcgcccccgccgccttcaagtacttcgacaccaccatcgaccggaagcggtacaccagcaccaaggaggtgctggacgccaccctgatccaccagagcatcaccggcctgtacgagacccggatcgacctgagccagctgggcggcgac

SEQ ID NO: 357 - DNA, 4134 bp, Artificial Sequence
  Synthetic: Cas9 nickase ORF using low A/U codons of Table 4 (no start or stop codons; suitable for inclusion in fusion protein coding sequence)
gacaagaagtacagcatcggcctggccatcggcaccaacagcgtgggctgggccgtgatcaccgacgagtacaaggtgcccagcaagaagttcaaggtgctgggcaacaccgaccggcacagcatcaagaagaacctgatcggcgccctgctgttcgacagcggcgagaccgccgaggccacccggctgaagcggaccgcccggcggcggtacacccggcggaagaaccggatctgctacctgcaggagatcttcagcaacgagatggccaaggtggacgacagcttcttccaccggctggaggagagcttcctggtggaggaggacaagaagcacgagcggcaccccatcttcggcaacatcgtggacgaggtggcctaccacgagaagtaccccaccatctaccacctgcggaagaagctggtggacagcaccgacaaggccgacctgcggctgatctacctggccctggcccacatgatcaagttccggggccacttcctgatcgagggcgacctgaaccccgacaacagcgacgtggacaagctgttcatccagctggtgcagacctacaaccagctgttcgaggagaaccccatcaacgccagcggcgtggacgccaaggccatcctgagcgcccggctgagcaagagccggcggctggagaacctgatcgcccagctgcccggcgagaagaagaacggcctgttcggcaacctgatcgccctgagcctgggcctgacccccaacttcaagagcaacttcgacctggccgaggacgccaagctgcagctgagcaaggacacctacgacgacgacctggacaacctgctggcccagatcggcgaccagtacgccgacctgttcctggccgccaagaacctgagcgacgccatcctgctgagcgacatcctgcgggtgaacaccgagatcaccaaggcccccctgagcgccagcatgatcaagcggtacgacgagcaccaccaggacctgaccctgctgaaggccctggtgcggcagcagctgcccgagaagtacaaggagatcttcttcgaccagagcaagaacggctacgccggctacatcgacggcggcgccagccaggaggagttctacaagttcatcaagcccatcctggagaagatggacggcaccgaggagctgctggtgaagctgaaccgggaggacctgctgcggaagcagcggaccttcgacaacggcagcatcccccaccagatccacctgggcgagctgcacgccatcctgcggcggcaggaggacttctaccccttcctgaaggacaaccgggagaagatcgagaagatcctgaccttccggatcccctactacgtgggccccctggcccggggcaacagccggttcgcctggatgacccggaagagcgaggagaccatcaccccctggaacttcgaggaggtggtggacaagggcgccagcgcccagagcttcatcgagcggatgaccaacttcgacaagaacctgcccaacgagaaggtgctgcccaagcacagcctgctgtacgagtacttcaccgtgtacaacgagctgaccaaggtgaagtacgtgaccgagggcatgcggaagcccgccttcctgagcggcgagcagaagaaggccatcgtggacctgctgttcaagaccaaccggaaggtgaccgtgaagcagctgaaggaggactacttcaagaagatcgagtgcttcgacagcgtggagatcagcggcgtggaggaccggttcaacgccagcctgggcacctaccacgacctgctgaagatcatcaaggacaaggacttcctggacaacgaggagaacgaggacatcctggaggacatcgtgctgaccctgaccctgttcgaggaccgggagatgatcgaggagcggctgaagacctacgcccacctgttcgacgacaaggtgatgaagcagctgaagcggcggcggtacaccggctggggccggctgagccggaagctgatcaacggcatccgggacaagcagagcggcaagaccatcctggacttcctgaagagcgacggcttcgccaaccggaacttcatgcagctgatccacgacgacagcctgaccttcaaggaggacatccagaaggcccaggtgagcggccagggcgacagcctgcacgagcacatcgccaacctggccggcagccccgccatcaagaagggcatcctgcagaccgtgaaggtggtggacgagctggtgaaggtgatgggccggcacaagcccgagaacatcgtgatcgagatggcccgggagaaccagaccacccagaagggccagaagaacagccgggagcggatgaagcggatcgaggagggcatcaaggagctgggcagccagatcctgaaggagcaccccgtggagaacacccagctgcagaacgagaagctgtacctgtactacctgcagaacggccgggacatgtacgtggaccaggagctggacatcaaccggctgagcgactacgacgtggaccacatcgtgccccagagcttcctgaaggacgacagcatcgacaacaaggtgctgacccggagcgacaagaaccggggcaagagcgacaacgtgcccagcgaggaggtggtgaagaagatgaagaactactggcggcagctgctgaacgccaagctgatcacccagcggaagttcgacaacctgaccaaggccgagcggggcggcctgagcgagctggacaaggccggcttcatcaagcggcagctggtggagacccggcagatcaccaagcacgtggcccagatcctggacagccggatgaacaccaagtacgacgagaacgacaagctgatccgggaggtgaaggtgatcaccctgaagagcaagctggtgagcgacttccggaaggacttccagttctacaaggtgcgggagatcaacaactaccaccacgcccacgacgcctacctgaacgccgtggtgggcaccgccctgatcaagaagtaccccaagctggagagcgagttcgtgtacggcgactacaaggtgtacgacgtgcggaagatgatcgccaagagcgagcaggagatcggcaaggccaccgccaagtacttcttctacagcaacatcatgaacttcttcaagaccgagatcaccctggccaacggcgagatccggaagcggcccctgatcgagaccaacggcgagaccggcgagatcgtgtgggacaagggccgggacttcgccaccgtgcggaaggtgctgagcatgccccaggtgaacatcgtgaagaagaccgaggtgcagaccggcggcttcagcaaggagagcatcctgcccaagcggaacagcgacaagctgatcgcccggaagaaggactgggaccccaagaagtacggcggcttcgacagccccaccgtggcctacagcgtgctggtggtggccaaggtggagaagggcaagagcaagaagctgaagagcgtgaaggagctgctgggcatcaccatcatggagcggagcagcttcgagaagaaccccatcgacttcctggaggccaagggctacaaggaggtgaagaaggacctgatcatcaagctgcccaagtacagcctgttcgagctggagaacggccggaagcggatgctggccagcgccggcgagctgcagaagggcaacgagctggccctgcccagcaagtacgtgaacttcctgtacctggccagccactacgagaagctgaagggcagccccgaggacaacgagcagaagcagctgttcgtggagcagcacaagcactacctggacgagatcatcgagcagatcagcgagttcagcaagcgggtgatcctggccgacgccaacctggacaaggtgctgagcgcctacaacaagcaccgggacaagcccatccgggagcaggccgagaacatcatccacctgttcaccctgaccaacctgggcgcccccgccgccttcaagtacttcgacaccaccatcgaccggaagcggtacaccagcaccaaggaggtgctggacgccaccctgatccaccagagcatcaccggcctgtacgagacccggatcgacctgagccagctgggcggcgacggcggcggcagccccaagaagaagcggaaggtg

SEQ ID NO: 358 - DNA, 4173 bp, Artificial Sequence
  Synthetic: Cas9 nickase ORF using low A/U codons of Table 4, with two C-terminal NLS sequences (no start or stop codons; suitable for inclusion in fusion protein coding sequence)
gacaagaagtacagcatcggcctggccatcggcaccaacagcgtgggctgggccgtgatcaccgacgagtacaaggtgcccagcaagaagttcaaggtgctgggcaacaccgaccggcacagcatcaagaagaacctgatcggcgccctgctgttcgacagcggcgagaccgccgaggccacccggctgaagcggaccgcccggcggcggtacacccggcggaagaaccggatctgctacctgcaggagatcttcagcaacgagatggccaaggtggacgacagcttcttccaccggctggaggagagcttcctggtggaggaggacaagaagcacgagcggcaccccatcttcggcaacatcgtggacgaggtggcctaccacgagaagtaccccaccatctaccacctgcggaagaagctggtggacagcaccgacaaggccgacctgcggctgatctacctggccctggcccacatgatcaagttccggggccacttcctgatcgagggcgacctgaaccccgacaacagcgacgtggacaagctgttcatccagctggtgcagacctacaaccagctgttcgaggagaaccccatcaacgccagcggcgtggacgccaaggccatcctgagcgcccggctgagcaagagccggcggctggagaacctgatcgcccagctgcccggcgagaagaagaacggcctgttcggcaacctgatcgccctgagcctgggcctgacccccaacttcaagagcaacttcgacctggccgaggacgccaagctgcagctgagcaaggacacctacgacgacgacctggacaacctgctggcccagatcggcgaccagtacgccgacctgttcctggccgccaagaacctgagcgacgccatcctgctgagcgacatcctgcgggtgaacaccgagatcaccaaggcccccctgagcgccagcatgatcaagcggtacgacgagcaccaccaggacctgaccctgctgaaggccctggtgcggcagcagctgcccgagaagtacaaggagatcttcttcgaccagagcaagaacggctacgccggctacatcgacggcggcgccagccaggaggagttctacaagttcatcaagcccatcctggagaagatggacggcaccgaggagctgctggtgaagctgaaccgggaggacctgctgcggaagcagcggaccttcgacaacggcagcatcccccaccagatccacctgggcgagctgcacgccatcctgcggcggcaggaggacttctaccccttcctgaaggacaaccgggagaagatcgagaagatcctgaccttccggatcccctactacgtgggccccctggcccggggcaacagccggttcgcctggatgacccggaagagcgaggagaccatcaccccctggaacttcgaggaggtggtggacaagggcgccagcgcccagagcttcatcgagcggatgaccaacttcgacaagaacctgcccaacgagaaggtgctgcccaagcacagcctgctgtacgagtacttcaccgtgtacaacgagctgaccaaggtgaagtacgtgaccgagggcatgcggaagcccgccttcctgagcggcgagcagaagaaggccatcgtggacctgctgttcaagaccaaccggaaggtgaccgtgaagcagctgaaggaggactacttcaagaagatcgagtgcttcgacagcgtggagatcagcggcgtggaggaccggttcaacgccagcctgggcacctaccacgacctgctgaagatcatcaaggacaaggacttcctggacaacgaggagaacgaggacatcctggaggacatcgtgctgaccctgaccctgttcgaggaccgggagatgatcgaggagcggctgaagacctacgcccacctgttcgacgacaaggtgatgaagcagctgaagcggcggcggtacaccggctggggccggctgagccggaagctgatcaacggcatccgggacaagcagagcggcaagaccatcctggacttcctgaagagcgacggcttcgccaaccggaacttcatgcagctgatccacgacgacagcctgaccttcaaggaggacatccagaaggcccaggtgagcggccagggcgacagcctgcacgagcacatcgccaacctggccggcagccccgccatcaagaagggcatcctgcagaccgtgaaggtggtggacgagctggtgaaggtgatgggccggcacaagcccgagaacatcgtgatcgagatggcccgggagaaccagaccacccagaagggccagaagaacagccgggagcggatgaagcggatcgaggagggcatcaaggagctgggcagccagatcctgaaggagcaccccgtggagaacacccagctgcagaacgagaagctgtacctgtactacctgcagaacggccgggacatgtacgtggaccaggagctggacatcaaccggctgagcgactacgacgtggaccacatcgtgccccagagcttcctgaaggacgacagcatcgacaacaaggtgctgacccggagcgacaagaaccggggcaagagcgacaacgtgcccagcgaggaggtggtgaagaagatgaagaactactggcggcagctgctgaacgccaagctgatcacccagcggaagttcgacaacctgaccaaggccgagcggggcggcctgagcgagctggacaaggccggcttcatcaagcggcagctggtggagacccggcagatcaccaagcacgtggcccagatcctggacagccggatgaacaccaagtacgacgagaacgacaagctgatccgggaggtgaaggtgatcaccctgaagagcaagctggtgagcgacttccggaaggacttccagttctacaaggtgcgggagatcaacaactaccaccacgcccacgacgcctacctgaacgccgtggtgggcaccgccctgatcaagaagtaccccaagctggagagcgagttcgtgtacggcgactacaaggtgtacgacgtgcggaagatgatcgccaagagcgagcaggagatcggcaaggccaccgccaagtacttcttctacagcaacatcatgaacttcttcaagaccgagatcaccctggccaacggcgagatccggaagcggcccctgatcgagaccaacggcgagaccggcgagatcgtgtgggacaagggccgggacttcgccaccgtgcggaaggtgctgagcatgccccaggtgaacatcgtgaagaagaccgaggtgcagaccggcggcttcagcaaggagagcatcctgcccaagcggaacagcgacaagctgatcgcccggaagaaggactgggaccccaagaagtacggcggcttcgacagccccaccgtggcctacagcgtgctggtggtggccaaggtggagaagggcaagagcaagaagctgaagagcgtgaaggagctgctgggcatcaccatcatggagcggagcagcttcgagaagaaccccatcgacttcctggaggccaagggctacaaggaggtgaagaaggacctgatcatcaagctgcccaagtacagcctgttcgagctggagaacggccggaagcggatgctggccagcgccggcgagctgcagaagggcaacgagctggccctgcccagcaagtacgtgaacttcctgtacctggccagccactacgagaagctgaagggcagccccgaggacaacgagcagaagcagctgttcgtggagcagcacaagcactacctggacgagatcatcgagcagatcagcgagttcagcaagcgggtgatcctggccgacgccaacctggacaaggtgctgagcgcctacaacaagcaccgggacaagcccatccgggagcaggccgagaacatcatccacctgttcaccctgaccaacctgggcgcccccgccgccttcaagtacttcgacaccaccatcgaccggaagcggtacaccagcaccaaggaggtgctggacgccaccctgatccaccagagcatcaccggcctgtacgagacccggatcgacctgagccagctgggcggcgacggcagcggcagccccaagaagaagcggaaggtggacggcagccccaagaagaagcggaaggtggacagcggc

SEQ ID NO: 359 - DNA, 4101 bp, Artificial Sequence
  Synthetic: Cas9 nickase ORF using low A/U codons of Table 4 (no NLS and no start or stop codons; suitable for inclusion in fusion protein coding sequence)
gacaagaagtacagcatcggcctggccatcggcaccaacagcgtgggctgggccgtgatcaccgacgagtacaaggtgcccagcaagaagttcaaggtgctgggcaacaccgaccggcacagcatcaagaagaacctgatcggcgccctgctgttcgacagcggcgagaccgccgaggccacccggctgaagcggaccgcccggcggcggtacacccggcggaagaaccggatctgctacctgcaggagatcttcagcaacgagatggccaaggtggacgacagcttcttccaccggctggaggagagcttcctggtggaggaggacaagaagcacgagcggcaccccatcttcggcaacatcgtggacgaggtggcctaccacgagaagtaccccaccatctaccacctgcggaagaagctggtggacagcaccgacaaggccgacctgcggctgatctacctggccctggcccacatgatcaagttccggggccacttcctgatcgagggcgacctgaaccccgacaacagcgacgtggacaagctgttcatccagctggtgcagacctacaaccagctgttcgaggagaaccccatcaacgccagcggcgtggacgccaaggccatcctgagcgcccggctgagcaagagccggcggctggagaacctgatcgcccagctgcccggcgagaagaagaacggcctgttcggcaacctgatcgccctgagcctgggcctgacccccaacttcaagagcaacttcgacctggccgaggacgccaagctgcagctgagcaaggacacctacgacgacgacctggacaacctgctggcccagatcggcgaccagtacgccgacctgttcctggccgccaagaacctgagcgacgccatcctgctgagcgacatcctgcgggtgaacaccgagatcaccaaggcccccctgagcgccagcatgatcaagcggtacgacgagcaccaccaggacctgaccctgctgaaggccctggtgcggcagcagctgcccgagaagtacaaggagatcttcttcgaccagagcaagaacggctacgccggctacatcgacggcggcgccagccaggaggagttctacaagttcatcaagcccatcctggagaagatggacggcaccgaggagctgctggtgaagctgaaccgggaggacctgctgcggaagcagcggaccttcgacaacggcagcatcccccaccagatccacctgggcgagctgcacgccatcctgcggcggcaggaggacttctaccccttcctgaaggacaaccgggagaagatcgagaagatcctgaccttccggatcccctactacgtgggccccctggcccggggcaacagccggttcgcctggatgacccggaagagcgaggagaccatcaccccctggaacttcgaggaggtggtggacaagggcgccagcgcccagagcttcatcgagcggatgaccaacttcgacaagaacctgcccaacgagaaggtgctgcccaagcacagcctgctgtacgagtacttcaccgtgtacaacgagctgaccaaggtgaagtacgtgaccgagggcatgcggaagcccgccttcctgagcggcgagcagaagaaggccatcgtggacctgctgttcaagaccaaccggaaggtgaccgtgaagcagctgaaggaggactacttcaagaagatcgagtgcttcgacagcgtggagatcagcggcgtggaggaccggttcaacgccagcctgggcacctaccacgacctgctgaagatcatcaaggacaaggacttcctggacaacgaggagaacgaggacatcctggaggacatcgtgctgaccctgaccctgttcgaggaccgggagatgatcgaggagcggctgaagacctacgcccacctgttcgacgacaaggtgatgaagcagctgaagcggcggcggtacaccggctggggccggctgagccggaagctgatcaacggcatccgggacaagcagagcggcaagaccatcctggacttcctgaagagcgacggcttcgccaaccggaacttcatgcagctgatccacgacgacagcctgaccttcaaggaggacatccagaaggcccaggtgagcggccagggcgacagcctgcacgagcacatcgccaacctggccggcagccccgccatcaagaagggcatcctgcagaccgtgaaggtggtggacgagctggtgaaggtgatgggccggcacaagcccgagaacatcgtgatcgagatggcccgggagaaccagaccacccagaagggccagaagaacagccgggagcggatgaagcggatcgaggagggcatcaaggagctgggcagccagatcctgaaggagcaccccgtggagaacacccagctgcagaacgagaagctgtacctgtactacctgcagaacggccgggacatgtacgtggaccaggagctggacatcaaccggctgagcgactacgacgtggaccacatcgtgccccagagcttcctgaaggacgacagcatcgacaacaaggtgctgacccggagcgacaagaaccggggcaagagcgacaacgtgcccagcgaggaggtggtgaagaagatgaagaactactggcggcagctgctgaacgccaagctgatcacccagcggaagttcgacaacctgaccaaggccgagcggggcggcctgagcgagctggacaaggccggcttcatcaagcggcagctggtggagacccggcagatcaccaagcacgtggcccagatcctggacagccggatgaacaccaagtacgacgagaacgacaagctgatccgggaggtgaaggtgatcaccctgaagagcaagctggtgagcgacttccggaaggacttccagttctacaaggtgcgggagatcaacaactaccaccacgcccacgacgcctacctgaacgccgtggtgggcaccgccctgatcaagaagtaccccaagctggagagcgagttcgtgtacggcgactacaaggtgtacgacgtgcggaagatgatcgccaagagcgagcaggagatcggcaaggccaccgccaagtacttcttctacagcaacatcatgaacttcttcaagaccgagatcaccctggccaacggcgagatccggaagcggcccctgatcgagaccaacggcgagaccggcgagatcgtgtgggacaagggccgggacttcgccaccgtgcggaaggtgctgagcatgccccaggtgaacatcgtgaagaagaccgaggtgcagaccggcggcttcagcaaggagagcatcctgcccaagcggaacagcgacaagctgatcgcccggaagaaggactgggaccccaagaagtacggcggcttcgacagccccaccgtggcctacagcgtgctggtggtggccaaggtggagaagggcaagagcaagaagctgaagagcgtgaaggagctgctgggcatcaccatcatggagcggagcagcttcgagaagaaccccatcgacttcctggaggccaagggctacaaggaggtgaagaaggacctgatcatcaagctgcccaagtacagcctgttcgagctggagaacggccggaagcggatgctggccagcgccggcgagctgcagaagggcaacgagctggccctgcccagcaagtacgtgaacttcctgtacctggccagccactacgagaagctgaagggcagccccgaggacaacgagcagaagcagctgttcgtggagcagcacaagcactacctggacgagatcatcgagcagatcagcgagttcagcaagcgggtgatcctggccgacgccaacctggacaaggtgctgagcgcctacaacaagcaccgggacaagcccatccgggagcaggccgagaacatcatccacctgttcaccctgaccaacctgggcgcccccgccgccttcaagtacttcgacaccaccatcgaccggaagcggtacaccagcaccaaggaggtgctggacgccaccctgatccaccagagcatcaccggcctgtacgagacccggatcgacctgagccagctgggcggcgac

SEQ ID NO: 360 - DNA, 4134 bp, Artificial Sequence
  Synthetic: dCas9 ORF using low A/U codons of Table 4 (no start or stop codons; suitable for inclusion in fusion protein coding sequence)
gacaagaagtacagcatcggcctggccatcggcaccaacagcgtgggctgggccgtgatcaccgacgagtacaaggtgcccagcaagaagttcaaggtgctgggcaacaccgaccggcacagcatcaagaagaacctgatcggcgccctgctgttcgacagcggcgagaccgccgaggccacccggctgaagcggaccgcccggcggcggtacacccggcggaagaaccggatctgctacctgcaggagatcttcagcaacgagatggccaaggtggacgacagcttcttccaccggctggaggagagcttcctggtggaggaggacaagaagcacgagcggcaccccatcttcggcaacatcgtggacgaggtggcctaccacgagaagtaccccaccatctaccacctgcggaagaagctggtggacagcaccgacaaggccgacctgcggctgatctacctggccctggcccacatgatcaagttccggggccacttcctgatcgagggcgacctgaaccccgacaacagcgacgtggacaagctgttcatccagctggtgcagacctacaaccagctgttcgaggagaaccccatcaacgccagcggcgtggacgccaaggccatcctgagcgcccggctgagcaagagccggcggctggagaacctgatcgcccagctgcccggcgagaagaagaacggcctgttcggcaacctgatcgccctgagcctgggcctgacccccaacttcaagagcaacttcgacctggccgaggacgccaagctgcagctgagcaaggacacctacgacgacgacctggacaacctgctggcccagatcggcgaccagtacgccgacctgttcctggccgccaagaacctgagcgacgccatcctgctgagcgacatcctgcgggtgaacaccgagatcaccaaggcccccctgagcgccagcatgatcaagcggtacgacgagcaccaccaggacctgaccctgctgaaggccctggtgcggcagcagctgcccgagaagtacaaggagatcttcttcgaccagagcaagaacggctacgccggctacatcgacggcggcgccagccaggaggagttctacaagttcatcaagcccatcctggagaagatggacggcaccgaggagctgctggtgaagctgaaccgggaggacctgctgcggaagcagcggaccttcgacaacggcagcatcccccaccagatccacctgggcgagctgcacgccatcctgcggcggcaggaggacttctaccccttcctgaaggacaaccgggagaagatcgagaagatcctgaccttccggatcccctactacgtgggccccctggcccggggcaacagccggttcgcctggatgacccggaagagcgaggagaccatcaccccctggaacttcgaggaggtggtggacaagggcgccagcgcccagagcttcatcgagcggatgaccaacttcgacaagaacctgcccaacgagaaggtgctgcccaagcacagcctgctgtacgagtacttcaccgtgtacaacgagctgaccaaggtgaagtacgtgaccgagggcatgcggaagcccgccttcctgagcggcgagcagaagaaggccatcgtggacctgctgttcaagaccaaccggaaggtgaccgtgaagcagctgaaggaggactacttcaagaagatcgagtgcttcgacagcgtggagatcagcggcgtggaggaccggttcaacgccagcctgggcacctaccacgacctgctgaagatcatcaaggacaaggacttcctggacaacgaggagaacgaggacatcctggaggacatcgtgctgaccctgaccctgttcgaggaccgggagatgatcgaggagcggctgaagacctacgcccacctgttcgacgacaaggtgatgaagcagctgaagcggcggcggtacaccggctggggccggctgagccggaagctgatcaacggcatccgggacaagcagagcggcaagaccatcctggacttcctgaagagcgacggcttcgccaaccggaacttcatgcagctgatccacgacgacagcctgaccttcaaggaggacatccagaaggcccaggtgagcggccagggcgacagcctgcacgagcacatcgccaacctggccggcagccccgccatcaagaagggcatcctgcagaccgtgaaggtggtggacgagctggtgaaggtgatgggccggcacaagcccgagaacatcgtgatcgagatggcccgggagaaccagaccacccagaagggccagaagaacagccgggagcggatgaagcggatcgaggagggcatcaaggagctgggcagccagatcctgaaggagcaccccgtggagaacacccagctgcagaacgagaagctgtacctgtactacctgcagaacggccgggacatgtacgtggaccaggagctggacatcaaccggctgagcgactacgacgtggacgccatcgtgccccagagcttcctgaaggacgacagcatcgacaacaaggtgctgacccggagcgacaagaaccggggcaagagcgacaacgtgcccagcgaggaggtggtgaagaagatgaagaactactggcggcagctgctgaacgccaagctgatcacccagcggaagttcgacaacctgaccaaggccgagcggggcggcctgagcgagctggacaaggccggcttcatcaagcggcagctggtggagacccggcagatcaccaagcacgtggcccagatcctggacagccggatgaacaccaagtacgacgagaacgacaagctgatccgggaggtgaaggtgatcaccctgaagagcaagctggtgagcgacttccggaaggacttccagttctacaaggtgcgggagatcaacaactaccaccacgcccacgacgcctacctgaacgccgtggtgggcaccgccctgatcaagaagtaccccaagctggagagcgagttcgtgtacggcgactacaaggtgtacgacgtgcggaagatgatcgccaagagcgagcaggagatcggcaaggccaccgccaagtacttcttctacagcaacatcatgaacttcttcaagaccgagatcaccctggccaacggcgagatccggaagcggcccctgatcgagaccaacggcgagaccggcgagatcgtgtgggacaagggccgggacttcgccaccgtgcggaaggtgctgagcatgccccaggtgaacatcgtgaagaagaccgaggtgcagaccggcggcttcagcaaggagagcatcctgcccaagcggaacagcgacaagctgatcgcccggaagaaggactgggaccccaagaagtacggcggcttcgacagccccaccgtggcctacagcgtgctggtggtggccaaggtggagaagggcaagagcaagaagctgaagagcgtgaaggagctgctgggcatcaccatcatggagcggagcagcttcgagaagaaccccatcgacttcctggaggccaagggctacaaggaggtgaagaaggacctgatcatcaagctgcccaagtacagcctgttcgagctggagaacggccggaagcggatgctggccagcgccggcgagctgcagaagggcaacgagctggccctgcccagcaagtacgtgaacttcctgtacctggccagccactacgagaagctgaagggcagccccgaggacaacgagcagaagcagctgttcgtggagcagcacaagcactacctggacgagatcatcgagcagatcagcgagttcagcaagcgggtgatcctggccgacgccaacctggacaaggtgctgagcgcctacaacaagcaccgggacaagcccatccgggagcaggccgagaacatcatccacctgttcaccctgaccaacctgggcgcccccgccgccttcaagtacttcgacaccaccatcgaccggaagcggtacaccagcaccaaggaggtgctggacgccaccctgatccaccagagcatcaccggcctgtacgagacccggatcgacctgagccagctgggcggcgacggcggcggcagccccaagaagaagcggaaggtg

SEQ ID NO: 361 - DNA, 4173 bp, Artificial Sequence
  Synthetic: dCas9 ORF using low A/U codons of Table 4, with two C-terminal NLS sequences (no start or stop codons; suitable for inclusion in fusion protein coding sequence)
gacaagaagtacagcatcggcctggccatcggcaccaacagcgtgggctgggccgtgatcaccgacgagtacaaggtgcccagcaagaagttcaaggtgctgggcaacaccgaccggcacagcatcaagaagaacctgatcggcgccctgctgttcgacagcggcgagaccgccgaggccacccggctgaagcggaccgcccggcggcggtacacccggcggaagaaccggatctgctacctgcaggagatcttcagcaacgagatggccaaggtggacgacagcttcttccaccggctggaggagagcttcctggtggaggaggacaagaagcacgagcggcaccccatcttcggcaacatcgtggacgaggtggcctaccacgagaagtaccccaccatctaccacctgcggaagaagctggtggacagcaccgacaaggccgacctgcggctgatctacctggccctggcccacatgatcaagttccggggccacttcctgatcgagggcgacctgaaccccgacaacagcgacgtggacaagctgttcatccagctggtgcagacctacaaccagctgttcgaggagaaccccatcaacgccagcggcgtggacgccaaggccatcctgagcgcccggctgagcaagagccggcggctggagaacctgatcgcccagctgcccggcgagaagaagaacggcctgttcggcaacctgatcgccctgagcctgggcctgacccccaacttcaagagcaacttcgacctggccgaggacgccaagctgcagctgagcaaggacacctacgacgacgacctggacaacctgctggcccagatcggcgaccagtacgccgacctgttcctggccgccaagaacctgagcgacgccatcctgctgagcgacatcctgcgggtgaacaccgagatcaccaaggcccccctgagcgccagcatgatcaagcggtacgacgagcaccaccaggacctgaccctgctgaaggccctggtgcggcagcagctgcccgagaagtacaaggagatcttcttcgaccagagcaagaacggctacgccggctacatcgacggcggcgccagccaggaggagttctacaagttcatcaagcccatcctggagaagatggacggcaccgaggagctgctggtgaagctgaaccgggaggacctgctgcggaagcagcggaccttcgacaacggcagcatcccccaccagatccacctgggcgagctgcacgccatcctgcggcggcaggaggacttctaccccttcctgaaggacaaccgggagaagatcgagaagatcctgaccttccggatcccctactacgtgggccccctggcccggggcaacagccggttcgcctggatgacccggaagagcgaggagaccatcaccccctggaacttcgaggaggtggtggacaagggcgccagcgcccagagcttcatcgagcggatgaccaacttcgacaagaacctgcccaacgagaaggtgctgcccaagcacagcctgctgtacgagtacttcaccgtgtacaacgagctgaccaaggtgaagtacgtgaccgagggcatgcggaagcccgccttcctgagcggcgagcagaagaaggccatcgtggacctgctgttcaagaccaaccggaaggtgaccgtgaagcagctgaaggaggactacttcaagaagatcgagtgcttcgacagcgtggagatcagcggcgtggaggaccggttcaacgccagcctgggcacctaccacgacctgctgaagatcatcaaggacaaggacttcctggacaacgaggagaacgaggacatcctggaggacatcgtgctgaccctgaccctgttcgaggaccgggagatgatcgaggagcggctgaagacctacgcccacctgttcgacgacaaggtgatgaagcagctgaagcggcggcggtacaccggctggggccggctgagccggaagctgatcaacggcatccgggacaagcagagcggcaagaccatcctggacttcctgaagagcgacggcttcgccaaccggaacttcatgcagctgatccacgacgacagcctgaccttcaaggaggacatccagaaggcccaggtgagcggccagggcgacagcctgcacgagcacatcgccaacctggccggcagccccgccatcaagaagggcatcctgcagaccgtgaaggtggtggacgagctggtgaaggtgatgggccggcacaagcccgagaacatcgtgatcgagatggcccgggagaaccagaccacccagaagggccagaagaacagccgggagcggatgaagcggatcgaggagggcatcaaggagctgggcagccagatcctgaaggagcaccccgtggagaacacccagctgcagaacgagaagctgtacctgtactacctgcagaacggccgggacatgtacgtggaccaggagctggacatcaaccggctgagcgactacgacgtggacgccatcgtgccccagagcttcctgaaggacgacagcatcgacaacaaggtgctgacccggagcgacaagaaccggggcaagagcgacaacgtgcccagcgaggaggtggtgaagaagatgaagaactactggcggcagctgctgaacgccaagctgatcacccagcggaagttcgacaacctgaccaaggccgagcggggcggcctgagcgagctggacaaggccggcttcatcaagcggcagctggtggagacccggcagatcaccaagcacgtggcccagatcctggacagccggatgaacaccaagtacgacgagaacgacaagctgatccgggaggtgaaggtgatcaccctgaagagcaagctggtgagcgacttccggaaggacttccagttctacaaggtgcgggagatcaacaactaccaccacgcccacgacgcctacctgaacgccgtggtgggcaccgccctgatcaagaagtaccccaagctggagagcgagttcgtgtacggcgactacaaggtgtacgacgtgcggaagatgatcgccaagagcgagcaggagatcggcaaggccaccgccaagtacttcttctacagcaacatcatgaacttcttcaagaccgagatcaccctggccaacggcgagatccggaagcggcccctgatcgagaccaacggcgagaccggcgagatcgtgtgggacaagggccgggacttcgccaccgtgcggaaggtgctgagcatgccccaggtgaacatcgtgaagaagaccgaggtgcagaccggcggcttcagcaaggagagcatcctgcccaagcggaacagcgacaagctgatcgcccggaagaaggactgggaccccaagaagtacggcggcttcgacagccccaccgtggcctacagcgtgctggtggtggccaaggtggagaagggcaagagcaagaagctgaagagcgtgaaggagctgctgggcatcaccatcatggagcggagcagcttcgagaagaaccccatcgacttcctggaggccaagggctacaaggaggtgaagaaggacctgatcatcaagctgcccaagtacagcctgttcgagctggagaacggccggaagcggatgctggccagcgccggcgagctgcagaagggcaacgagctggccctgcccagcaagtacgtgaacttcctgtacctggccagccactacgagaagctgaagggcagccccgaggacaacgagcagaagcagctgttcgtggagcagcacaagcactacctggacgagatcatcgagcagatcagcgagttcagcaagcgggtgatcctggccgacgccaacctggacaaggtgctgagcgcctacaacaagcaccgggacaagcccatccgggagcaggccgagaacatcatccacctgttcaccctgaccaacctgggcgcccccgccgccttcaagtacttcgacaccaccatcgaccggaagcggtacaccagcaccaaggaggtgctggacgccaccctgatccaccagagcatcaccggcctgtacgagacccggatcgacctgagccagctgggcggcgacggcagcggcagccccaagaagaagcggaaggtggacggcagccccaagaagaagcggaaggtggacagcggc

SEQ ID NO: 362 - DNA, 4101 bp, Artificial Sequence
  Synthetic: dCas9 ORF using low A/U codons of Table 4 (no NLS and no start or stop codons; suitable for inclusion in fusion protein coding sequence)
gacaagaagtacagcatcggcctggccatcggcaccaacagcgtgggctgggccgtgatcaccgacgagtacaaggtgcccagcaagaagttcaaggtgctgggcaacaccgaccggcacagcatcaagaagaacctgatcggcgccctgctgttcgacagcggcgagaccgccgaggccacccggctgaagcggaccgcccggcggcggtacacccggcggaagaaccggatctgctacctgcaggagatcttcagcaacgagatggccaaggtggacgacagcttcttccaccggctggaggagagcttcctggtggaggaggacaagaagcacgagcggcaccccatcttcggcaacatcgtggacgaggtggcctaccacgagaagtaccccaccatctaccacctgcggaagaagctggtggacagcaccgacaaggccgacctgcggctgatctacctggccctggcccacatgatcaagttccggggccacttcctgatcgagggcgacctgaaccccgacaacagcgacgtggacaagctgttcatccagctggtgcagacctacaaccagctgttcgaggagaaccccatcaacgccagcggcgtggacgccaaggccatcctgagcgcccggctgagcaagagccggcggctggagaacctgatcgcccagctgcccggcgagaagaagaacggcctgttcggcaacctgatcgccctgagcctgggcctgacccccaacttcaagagcaacttcgacctggccgaggacgccaagctgcagctgagcaaggacacctacgacgacgacctggacaacctgctggcccagatcggcgaccagtacgccgacctgttcctggccgccaagaacctgagcgacgccatcctgctgagcgacatcctgcgggtgaacaccgagatcaccaaggcccccctgagcgccagcatgatcaagcggtacgacgagcaccaccaggacctgaccctgctgaaggccctggtgcggcagcagctgcccgagaagtacaaggagatcttcttcgaccagagcaagaacggctacgccggctacatcgacggcggcgccagccaggaggagttctacaagttcatcaagcccatcctggagaagatggacggcaccgaggagctgctggtgaagctgaaccgggaggacctgctgcggaagcagcggaccttcgacaacggcagcatcccccaccagatccacctgggcgagctgcacgccatcctgcggcggcaggaggacttctaccccttcctgaaggacaaccgggagaagatcgagaagatcctgaccttccggatcccctactacgtgggccccctggcccggggcaacagccggttcgcctggatgacccggaagagcgaggagaccatcaccccctggaacttcgaggaggtggtggacaagggcgccagcgcccagagcttcatcgagcggatgaccaacttcgacaagaacctgcccaacgagaaggtgctgcccaagcacagcctgctgtacgagtacttcaccgtgtacaacgagctgaccaaggtgaagtacgtgaccgagggcatgcggaagcccgccttcctgagcggcgagcagaagaaggccatcgtggacctgctgttcaagaccaaccggaaggtgaccgtgaagcagctgaaggaggactacttcaagaagatcgagtgcttcgacagcgtggagatcagcggcgtggaggaccggttcaacgccagcctgggcacctaccacgacctgctgaagatcatcaaggacaaggacttcctggacaacgaggagaacgaggacatcctggaggacatcgtgctgaccctgaccctgttcgaggaccgggagatgatcgaggagcggctgaagacctacgcccacctgttcgacgacaaggtgatgaagcagctgaagcggcggcggtacaccggctggggccggctgagccggaagctgatcaacggcatccgggacaagcagagcggcaagaccatcctggacttcctgaagagcgacggcttcgccaaccggaacttcatgcagctgatccacgacgacagcctgaccttcaaggaggacatccagaaggcccaggtgagcggccagggcgacagcctgcacgagcacatcgccaacctggccggcagccccgccatcaagaagggcatcctgcagaccgtgaaggtggtggacgagctggtgaaggtgatgggccggcacaagcccgagaacatcgtgatcgagatggcccgggagaaccagaccacccagaagggccagaagaacagccgggagcggatgaagcggatcgaggagggcatcaaggagctgggcagccagatcctgaaggagcaccccgtggagaacacccagctgcagaacgagaagctgtacctgtactacctgcagaacggccgggacatgtacgtggaccaggagctggacatcaaccggctgagcgactacgacgtggacgccatcgtgccccagagcttcctgaaggacgacagcatcgacaacaaggtgctgacccggagcgacaagaaccggggcaagagcgacaacgtgcccagcgaggaggtggtgaagaagatgaagaactactggcggcagctgctgaacgccaagctgatcacccagcggaagttcgacaacctgaccaaggccgagcggggcggcctgagcgagctggacaaggccggcttcatcaagcggcagctggtggagacccggcagatcaccaagcacgtggcccagatcctggacagccggatgaacaccaagtacgacgagaacgacaagctgatccgggaggtgaaggtgatcaccctgaagagcaagctggtgagcgacttccggaaggacttccagttctacaaggtgcgggagatcaacaactaccaccacgcccacgacgcctacctgaacgccgtggtgggcaccgccctgatcaagaagtaccccaagctggagagcgagttcgtgtacggcgactacaaggtgtacgacgtgcggaagatgatcgccaagagcgagcaggagatcggcaaggccaccgccaagtacttcttctacagcaacatcatgaacttcttcaagaccgagatcaccctggccaacggcgagatccggaagcggcccctgatcgagaccaacggcgagaccggcgagatcgtgtgggacaagggccgggacttcgccaccgtgcggaaggtgctgagcatgccccaggtgaacatcgtgaagaagaccgaggtgcagaccggcggcttcagcaaggagagcatcctgcccaagcggaacagcgacaagctgatcgcccggaagaaggactgggaccccaagaagtacggcggcttcgacagccccaccgtggcctacagcgtgctggtggtggccaaggtggagaagggcaagagcaagaagctgaagagcgtgaaggagctgctgggcatcaccatcatggagcggagcagcttcgagaagaaccccatcgacttcctggaggccaagggctacaaggaggtgaagaaggacctgatcatcaagctgcccaagtacagcctgttcgagctggagaacggccggaagcggatgctggccagcgccggcgagctgcagaagggcaacgagctggccctgcccagcaagtacgtgaacttcctgtacctggccagccactacgagaagctgaagggcagccccgaggacaacgagcagaagcagctgttcgtggagcagcacaagcactacctggacgagatcatcgagcagatcagcgagttcagcaagcgggtgatcctggccgacgccaacctggacaaggtgctgagcgcctacaacaagcaccgggacaagcccatccgggagcaggccgagaacatcatccacctgttcaccctgaccaacctgggcgcccccgccgccttcaagtacttcgacaccaccatcgaccggaagcggtacaccagcaccaaggaggtgctggacgccaccctgatccaccagagcatcaccggcctgtacgagacccggatcgacctgagccagctgggcggcgac

SEQ ID NO: 363 - DNA, 3306 bp, Artificial Sequence
  Synthetic: Nme Cas9 ORF using low A codons of Table 4 (no start or stop codons; suitable for inclusion in fusion protein coding sequence)
gccgccttcaagcccaactccatcaactacatcctgggcctggacatcggcatcgcctccgtgggctgggccatggtggagatcgacgaggaggagaaccccatccggctgatcgacctgggcgtgcgggtgttcgagcgggccgaggtgcccaagaccggcgactccctggccatggcccggcggctggcccggtccgtgcggcggctgacccggcggcgggcccaccggctgctgcggacccggcggctgctgaagcgggagggcgtgctgcaggccgccaacttcgacgagaacggcctgatcaagtccctgcccaacaccccctggcagctgcgggccgccgccctggaccggaagctgacccccctggagtggtccgccgtgctgctgcacctgatcaagcaccggggctacctgtcccagcggaagaacgagggcgagaccgccgacaaggagctgggcgccctgctgaagggcgtggccggcaacgcccacgccctgcagaccggcgacttccggacccccgccgagctggccctgaacaagttcgagaaggagtccggccacatccggaaccagcggtccgactactcccacaccttctcccggaaggacctgcaggccgagctgatcctgctgttcgagaagcagaaggagttcggcaacccccacgtgtccggcggcctgaaggagggcatcgagaccctgctgatgacccagcggcccgccctgtccggcgacgccgtgcagaagatgctgggccactgcaccttcgagcccgccgagcccaaggccgccaagaacacctacaccgccgagcggttcatctggctgaccaagctgaacaacctgcggatcctggagcagggctccgagcggcccctgaccgacaccgagcgggccaccctgatggacgagccctaccggaagtccaagctgacctacgcccaggcccggaagctgctgggcctggaggacaccgccttcttcaagggcctgcggtacggcaaggacaacgccgaggcctccaccctgatggagatgaaggcctaccacgccatctcccgggccctggagaaggagggcctgaaggacaagaagtcccccctgaacctgtcccccgagctgcaggacgagatcggcaccgccttctccctgttcaagaccgacgaggacatcaccggccggctgaaggaccggatccagcccgagatcctggaggccctgctgaagcacatctccttcgacaagttcgtgcagatctccctgaaggccctgcggcggatcgtgcccctgatggagcagggcaagcggtacgacgaggcctgcgccgagatctacggcgaccactacggcaagaagaacaccgaggagaagatctacctgccccccatccccgccgacgagatccggaaccccgtggtgctgcgggccctgtcccaggcccggaaggtgatcaacggcgtggtgcggcggtacggctcccccgcccggatccacatcgagaccgcccgggaggtgggcaagtccttcaaggaccggaaggagatcgagaagcggcaggaggagaaccggaaggaccgggagaaggccgccgccaagttccgggagtacttccccaacttcgtgggcgagcccaagtccaaggacatcctgaagctgcggctgtacgagcagcagcacggcaagtgcctgtactccggcaaggagatcaacctgggccggctgaacgagaagggctacgtggagatcgaccacgccctgcccttctcccggacctgggacgactccttcaacaacaaggtgctggtgctgggctccgagaaccagaacaagggcaaccagaccccctacgagtacttcaacggcaaggacaactcccgggagtggcaggagttcaaggcccgggtggagacctcccggttcccccggtccaagaagcagcggatcctgctgcagaagttcgacgaggacggcttcaaggagcggaacctgaacgacacccggtacgtgaaccggttcctgtgccagttcgtggccgaccggatgcggctgaccggcaagggcaagaagcgggtgttcgcctccaacggccagatcaccaacctgctgcggggcttctggggcctgcggaaggtgcgggccgagaacgaccggcaccacgccctggacgccgtggtggtggcctgctccaccgtggccatgcagcagaagatcacccggttcgtgcggtacaaggagatgaacgccttcgacggcaagaccatcgacaaggagaccggcgaggtgctgcaccagaagacccacttcccccagccctgggagttcttcgcccaggaggtgatgatccgggtgttcggcaagcccgacggcaagcccgagttcgaggaggccgacaccctggagaagctgcggaccctgctggccgagaagctgtcctcccggcccgaggccgtgcacgagtacgtgacccccctgttcgtgtcccgggcccccaaccggaagatgtccggccagggccacatggagaccgtgaagtccgccaagcggctggacgagggcgtgtccgtgctgcgggtgcccctgacccagctgaagctgaaggacctggagaagatggtgaaccgggagcgggagcccaagctgtacgaggccctgaaggcccggctggaggcccacaaggacgaccccgccaaggccttcgccgagcccttctacaagtacgacaaggccggcaaccggacccagcaggtgaaggccgtgcgggtggagcaggtgcagaagaccggcgtgtgggtgcggaaccacaacggcatcgccgacaacgccaccatggtgcgggtggacgtgttcgagaagggcgacaagtactacctggtgcccatctactcctggcaggtggccaagggcatcctgcccgaccgggccgtggtgcagggcaaggacgaggaggactggcagctgatcgacgactccttcaacttcaagttctccctgcaccccaacgacctggtggaggtgatcaccaagaaggcccggatgttcggctacttcgcctcctgccaccggggcaccggcaacatcaacatccggatccacgacctggaccacaagatcggcaagaacggcatcctggagggcatcggcgtgaagaccgccctgtccttccagaagtaccagatcgacgagctgggcaaggagatccggccctgccggctgaagaagcggccccccgtgcggtccggcaagcggaccgccgacggctccgagttcgagtcccccaagaagaagcggaaggtggag

SEQ ID NO: 364 - DNA, 3306 bp, Artificial Sequence
  Synthetic: Nme Cas9 ORF using low A/U codons of Table 4 (no start or stop codons; suitable for inclusion in fusion protein coding sequence)
gccgccttcaagcccaacagcatcaactacatcctgggcctggacatcggcatcgccagcgtgggctgggccatggtggagatcgacgaggaggagaaccccatccggctgatcgacctgggcgtgcgggtgttcgagcgggccgaggtgcccaagaccggcgacagcctggccatggcccggcggctggcccggagcgtgcggcggctgacccggcggcgggcccaccggctgctgcggacccggcggctgctgaagcgggagggcgtgctgcaggccgccaacttcgacgagaacggcctgatcaagagcctgcccaacaccccctggcagctgcgggccgccgccctggaccggaagctgacccccctggagtggagcgccgtgctgctgcacctgatcaagcaccggggctacctgagccagcggaagaacgagggcgagaccgccgacaaggagctgggcgccctgctgaagggcgtggccggcaacgcccacgccctgcagaccggcgacttccggacccccgccgagctggccctgaacaagttcgagaaggagagcggccacatccggaaccagcggagcgactacagccacaccttcagccggaaggacctgcaggccgagctgatcctgctgttcgagaagcagaaggagttcggcaacccccacgtgagcggcggcctgaaggagggcatcgagaccctgctgatgacccagcggcccgccctgagcggcgacgccgtgcagaagatgctgggccactgcaccttcgagcccgccgagcccaaggccgccaagaacacctacaccgccgagcggttcatctggctgaccaagctgaacaacctgcggatcctggagcagggcagcgagcggcccctgaccgacaccgagcgggccaccctgatggacgagccctaccggaagagcaagctgacctacgcccaggcccggaagctgctgggcctggaggacaccgccttcttcaagggcctgcggtacggcaaggacaacgccgaggccagcaccctgatggagatgaaggcctaccacgccatcagccgggccctggagaaggagggcctgaaggacaagaagagccccctgaacctgagccccgagctgcaggacgagatcggcaccgccttcagcctgttcaagaccgacgaggacatcaccggccggctgaaggaccggatccagcccgagatcctggaggccctgctgaagcacatcagcttcgacaagttcgtgcagatcagcctgaaggccctgcggcggatcgtgcccctgatggagcagggcaagcggtacgacgaggcctgcgccgagatctacggcgaccactacggcaagaagaacaccgaggagaagatctacctgccccccatccccgccgacgagatccggaaccccgtggtgctgcgggccctgagccaggcccggaaggtgatcaacggcgtggtgcggcggtacggcagccccgcccggatccacatcgagaccgcccgggaggtgggcaagagcttcaaggaccggaaggagatcgagaagcggcaggaggagaaccggaaggaccgggagaaggccgccgccaagttccgggagtacttccccaacttcgtgggcgagcccaagagcaaggacatcctgaagctgcggctgtacgagcagcagcacggcaagtgcctgtacagcggcaaggagatcaacctgggccggctgaacgagaagggctacgtggagatcgaccacgccctgcccttcagccggacctgggacgacagcttcaacaacaaggtgctggtgctgggcagcgagaaccagaacaagggcaaccagaccccctacgagtacttcaacggcaaggacaacagccgggagtggcaggagttcaaggcccgggtggagaccagccggttcccccggagcaagaagcagcggatcctgctgcagaagttcgacgaggacggcttcaaggagcggaacctgaacgacacccggtacgtgaaccggttcctgtgccagttcgtggccgaccggatgcggctgaccggcaagggcaagaagcgggtgttcgccagcaacggccagatcaccaacctgctgcggggcttctggggcctgcggaaggtgcgggccgagaacgaccggcaccacgccctggacgccgtggtggtggcctgcagcaccgtggccatgcagcagaagatcacccggttcgtgcggtacaaggagatgaacgccttcgacggcaagaccatcgacaaggagaccggcgaggtgctgcaccagaagacccacttcccccagccctgggagttcttcgcccaggaggtgatgatccgggtgttcggcaagcccgacggcaagcccgagttcgaggaggccgacaccctggagaagctgcggaccctgctggccgagaagctgagcagccggcccgaggccgtgcacgagtacgtgacccccctgttcgtgagccgggcccccaaccggaagatgagcggccagggccacatggagaccgtgaagagcgccaagcggctggacgagggcgtgagcgtgctgcgggtgcccctgacccagctgaagctgaaggacctggagaagatggtgaaccgggagcgggagcccaagctgtacgaggccctgaaggcccggctggaggcccacaaggacgaccccgccaaggccttcgccgagcccttctacaagtacgacaaggccggcaaccggacccagcaggtgaaggccgtgcgggtggagcaggtgcagaagaccggcgtgtgggtgcggaaccacaacggcatcgccgacaacgccaccatggtgcgggtggacgtgttcgagaagggcgacaagtactacctggtgcccatctacagctggcaggtggccaagggcatcctgcccgaccgggccgtggtgcagggcaaggacgaggaggactggcagctgatcgacgacagcttcaacttcaagttcagcctgcaccccaacgacctggtggaggtgatcaccaagaaggcccggatgttcggctacttcgccagctgccaccggggcaccggcaacatcaacatccggatccacgacctggaccacaagatcggcaagaacggcatcctggagggcatcggcgtgaagaccgccctgagcttccagaagtaccagatcgacgagctgggcaaggagatccggccctgccggctgaagaagcggccccccgtgcggagcggcaagcggaccgccgacggcagcgagttcgagagccccaagaagaagcggaaggtggag

SEQ ID NO: 365 - DNA, 4140 bp, Artificial Sequence
  Synthetic: Open reading frame for Cas9 with NLS1 (no start or stop codons; suitable for inclusion in fusion protein coding sequence)
gacaagaagtacagcatcggactggacatcggaacaaacagcgtcggatgggcagtcatcacagacgaatacaaggtcccgagcaagaagttcaaggtcctgggaaacacagacagacacagcatcaagaagaacctgatcggagcactgctgttcgacagcggagaaacagcagaagcaacaagactgaagagaacagcaagaagaagatacacaagaagaaagaacagaatctgctacctgcaggaaatcttcagcaacgaaatggcaaaggtcgacgacagcttcttccacagactggaagaaagcttcctggtcgaagaagacaagaagcacgaaagacacccgatcttcggaaacatcgtcgacgaagtcgcataccacgaaaagtacccgacaatctaccacctgagaaagaagctggtcgacagcacagacaaggcagacctgagactgatctacctggcactggcacacatgatcaagttcagaggacacttcctgatcgaaggagacctgaacccggacaacagcgacgtcgacaagctgttcatccagctggtccagacatacaaccagctgttcgaagaaaacccgatcaacgcaagcggagtcgacgcaaaggcaatcctgagcgcaagactgagcaagagcagaagactggaaaacctgatcgcacagctgccgggagaaaagaagaacggactgttcggaaacctgatcgcactgagcctgggactgacaccgaacttcaagagcaacttcgacctggcagaagacgcaaagctgcagctgagcaaggacacatacgacgacgacctggacaacctgctggcacagatcggagaccagtacgcagacctgttcctggcagcaaagaacctgagcgacgcaatcctgctgagcgacatcctgagagtcaacacagaaatcacaaaggcaccgctgagcgcaagcatgatcaagagatacgacgaacaccaccaggacctgacactgctgaaggcactggtcagacagcagctgccggaaaagtacaaggaaatcttcttcgaccagagcaagaacggatacgcaggatacatcgacggaggagcaagccaggaagaattctacaagttcatcaagccgatcctggaaaagatggacggaacagaagaactgctggtcaagctgaacagagaagacctgctgagaaagcagagaacattcgacaacggaagcatcccgcaccagatccacctgggagaactgcacgcaatcctgagaagacaggaagacttctacccgttcctgaaggacaacagagaaaagatcgaaaagatcctgacattcagaatcccgtactacgtcggaccgctggcaagaggaaacagcagattcgcatggatgacaagaaagagcgaagaaacaatcacaccgtggaacttcgaagaagtcgtcgacaagggagcaagcgcacagagcttcatcgaaagaatgacaaacttcgacaagaacctgccgaacgaaaaggtcctgccgaagcacagcctgctgtacgaatacttcacagtctacaacgaactgacaaaggtcaagtacgtcacagaaggaatgagaaagccggcattcctgagcggagaacagaagaaggcaatcgtcgacctgctgttcaagacaaacagaaaggtcacagtcaagcagctgaaggaagactacttcaagaagatcgaatgcttcgacagcgtcgaaatcagcggagtcgaagacagattcaacgcaagcctgggaacataccacgacctgctgaagatcatcaaggacaaggacttcctggacaacgaagaaaacgaagacatcctggaagacatcgtcctgacactgacactgttcgaagacagagaaatgatcgaagaaagactgaagacatacgcacacctgttcgacgacaaggtcatgaagcagctgaagagaagaagatacacaggatggggaagactgagcagaaagctgatcaacggaatcagagacaagcagagcggaaagacaatcctggacttcctgaagagcgacggattcgcaaacagaaacttcatgcagctgatccacgacgacagcctgacattcaaggaagacatccagaaggcacaggtcagcggacagggagacagcctgcacgaacacatcgcaaacctggcaggaagcccggcaatcaagaagggaatcctgcagacagtcaaggtcgtcgacgaactggtcaaggtcatgggaagacacaagccggaaaacatcgtcatcgaaatggcaagagaaaaccagacaacacagaagggacagaagaacagcagagaaagaatgaagagaatcgaagaaggaatcaaggaactgggaagccagatcctgaaggaacacccggtcgaaaacacacagctgcagaacgaaaagctgtacctgtactacctgcagaacggaagagacatgtacgtcgaccaggaactggacatcaacagactgagcgactacgacgtcgaccacatcgtcccgcagagcttcctgaaggacgacagcatcgacaacaaggtcctgacaagaagcgacaagaacagaggaaagagcgacaacgtcccgagcgaagaagtcgtcaagaagatgaagaactactggagacagctgctgaacgcaaagctgatcacacagagaaagttcgacaacctgacaaaggcagagagaggaggactgagcgaactggacaaggcaggattcatcaagagacagctggtcgaaacaagacagatcacaaagcacgtcgcacagatcctggacagcagaatgaacacaaagtacgacgaaaacgacaagctgatcagagaagtcaaggtcatcacactgaagagcaagctggtcagcgacttcagaaaggacttccagttctacaaggtcagagaaatcaacaactaccaccacgcacacgacgcatacctgaacgcagtcgtcggaacagcactgatcaagaagtacccgaagctggaaagcgaattcgtctacggagactacaaggtctacgacgtcagaaagatgatcgcaaagagcgaacaggaaatcggaaaggcaacagcaaagtacttcttctacagcaacatcatgaacttcttcaagacagaaatcacactggcaaacggagaaatcagaaagagaccgctgatcgaaacaaacggagaaacaggagaaatcgtctgggacaagggaagagacttcgcaacagtcagaaaggtcctgagcatgccgcaggtcaacatcgtcaagaagacagaagtccagacaggaggattcagcaaggaaagcatcctgccgaagagaaacagcgacaagctgatcgcaagaaagaaggactgggacccgaagaagtacggaggattcgacagcccgacagtcgcatacagcgtcctggtcgtcgcaaaggtcgaaaagggaaagagcaagaagctgaagagcgtcaaggaactgctgggaatcacaatcatggaaagaagcagcttcgaaaagaacccgatcgacttcctggaagcaaagggatacaaggaagtcaagaaggacctgatcatcaagctgccgaagtacagcctgttcgaactggaaaacggaagaaagagaatgctggcaagcgcaggagaactgcagaagggaaacgaactggcactgccgagcaagtacgtcaacttcctgtacctggcaagccactacgaaaagctgaagggaagcccggaagacaacgaacagaagcagctgttcgtcgaacagcacaagcactacctggacgaaatcatcgaacagatcagcgaattcagcaagagagtcatcctggcagacgcaaacctggacaaggtcctgagcgcatacaacaagcacagagacaagccgatcagagaacaggcagaaaacatcatccacctgttcacactgacaaacctgggagcaccggcagcattcaagtacttcgacacaacaatcgacagaaagagatacacaagcacaaaggaagtcctggacgcaacactgatccaccagagcatcacaggactgtacgaaacaagaatcgacctgagccagctgggaggagacggaggaggaagcctggcagcaaagagaagcagaacaaca

SEQ ID NO: 366 - DNA, 4140 bp, Artificial Sequence
  Synthetic: Open reading frame for Cas9 with NLS2 (no start or stop codons; suitable for inclusion in fusion protein coding sequence)
gacaagaagtacagcatcggactggacatcggaacaaacagcgtcggatgggcagtcatcacagacgaatacaaggtcccgagcaagaagttcaaggtcctgggaaacacagacagacacagcatcaagaagaacctgatcggagcactgctgttcgacagcggagaaacagcagaagcaacaagactgaagagaacagcaagaagaagatacacaagaagaaagaacagaatctgctacctgcaggaaatcttcagcaacgaaatggcaaaggtcgacgacagcttcttccacagactggaagaaagcttcctggtcgaagaagacaagaagcacgaaagacacccgatcttcggaaacatcgtcgacgaagtcgcataccacgaaaagtacccgacaatctaccacctgagaaagaagctggtcgacagcacagacaaggcagacctgagactgatctacctggcactggcacacatgatcaagttcagaggacacttcctgatcgaaggagacctgaacccggacaacagcgacgtcgacaagctgttcatccagctggtccagacatacaaccagctgttcgaagaaaacccgatcaacgcaagcggagtcgacgcaaaggcaatcctgagcgcaagactgagcaagagcagaagactggaaaacctgatcgcacagctgccgggagaaaagaagaacggactgttcggaaacctgatcgcactgagcctgggactgacaccgaacttcaagagcaacttcgacctggcagaagacgcaaagctgcagctgagcaaggacacatacgacgacgacctggacaacctgctggcacagatcggagaccagtacgcagacctgttcctggcagcaaagaacctgagcgacgcaatcctgctgagcgacatcctgagagtcaacacagaaatcacaaaggcaccgctgagcgcaagcatgatcaagagatacgacgaacaccaccaggacctgacactgctgaaggcactggtcagacagcagctgccggaaaagtacaaggaaatcttcttcgaccagagcaagaacggatacgcaggatacatcgacggaggagcaagccaggaagaattctacaagttcatcaagccgatcctggaaaagatggacggaacagaagaactgctggtcaagctgaacagagaagacctgctgagaaagcagagaacattcgacaacggaagcatcccgcaccagatccacctgggagaactgcacgcaatcctgagaagacaggaagacttctacccgttcctgaaggacaacagagaaaagatcgaaaagatcctgacattcagaatcccgtactacgtcggaccgctggcaagaggaaacagcagattcgcatggatgacaagaaagagcgaagaaacaatcacaccgtggaacttcgaagaagtcgtcgacaagggagcaagcgcacagagcttcatcgaaagaatgacaaacttcgacaagaacctgccgaacgaaaaggtcctgccgaagcacagcctgctgtacgaatacttcacagtctacaacgaactgacaaaggtcaagtacgtcacagaaggaatgagaaagccggcattcctgagcggagaacagaagaaggcaatcgtcgacctgctgttcaagacaaacagaaaggtcacagtcaagcagctgaaggaagactacttcaagaagatcgaatgcttcgacagcgtcgaaatcagcggagtcgaagacagattcaacgcaagcctgggaacataccacgacctgctgaagatcatcaaggacaaggacttcctggacaacgaagaaaacgaagacatcctggaagacatcgtcctgacactgacactgttcgaagacagagaaatgatcgaagaaagactgaagacatacgcacacctgttcgacgacaaggtcatgaagcagctgaagagaagaagatacacaggatggggaagactgagcagaaagctgatcaacggaatcagagacaagcagagcggaaagacaatcctggacttcctgaagagcgacggattcgcaaacagaaacttcatgcagctgatccacgacgacagcctgacattcaaggaagacatccagaaggcacaggtcagcggacagggagacagcctgcacgaacacatcgcaaacctggcaggaagcccggcaatcaagaagggaatcctgcagacagtcaaggtcgtcgacgaactggtcaaggtcatgggaagacacaagccggaaaacatcgtcatcgaaatggcaagagaaaaccagacaacacagaagggacagaagaacagcagagaaagaatgaagagaatcgaagaaggaatcaaggaactgggaagccagatcctgaaggaacacccggtcgaaaacacacagctgcagaacgaaaagctgtacctgtactacctgcagaacggaagagacatgtacgtcgaccaggaactggacatcaacagactgagcgactacgacgtcgaccacatcgtcccgcagagcttcctgaaggacgacagcatcgacaacaaggtcctgacaagaagcgacaagaacagaggaaagagcgacaacgtcccgagcgaagaagtcgtcaagaagatgaagaactactggagacagctgctgaacgcaaagctgatcacacagagaaagttcgacaacctgacaaaggcagagagaggaggactgagcgaactggacaaggcaggattcatcaagagacagctggtcgaaacaagacagatcacaaagcacgtcgcacagatcctggacagcagaatgaacacaaagtacgacgaaaacgacaagctgatcagagaagtcaaggtcatcacactgaagagcaagctggtcagcgacttcagaaaggacttccagttctacaaggtcagagaaatcaacaactaccaccacgcacacgacgcatacctgaacgcagtcgtcggaacagcactgatcaagaagtacccgaagctggaaagcgaattcgtctacggagactacaaggtctacgacgtcagaaagatgatcgcaaagagcgaacaggaaatcggaaaggcaacagcaaagtacttcttctacagcaacatcatgaacttcttcaagacagaaatcacactggcaaacggagaaatcagaaagagaccgctgatcgaaacaaacggagaaacaggagaaatcgtctgggacaagggaagagacttcgcaacagtcagaaaggtcctgagcatgccgcaggtcaacatcgtcaagaagacagaagtccagacaggaggattcagcaaggaaagcatcctgccgaagagaaacagcgacaagctgatcgcaagaaagaaggactgggacccgaagaagtacggaggattcgacagcccgacagtcgcatacagcgtcctggtcgtcgcaaaggtcgaaaagggaaagagcaagaagctgaagagcgtcaaggaactgctgggaatcacaatcatggaaagaagcagcttcgaaaagaacccgatcgacttcctggaagcaaagggatacaaggaagtcaagaaggacctgatcatcaagctgccgaagtacagcctgttcgaactggaaaacggaagaaagagaatgctggcaagcgcaggagaactgcagaagggaaacgaactggcactgccgagcaagtacgtcaacttcctgtacctggcaagccactacgaaaagctgaagggaagcccggaagacaacgaacagaagcagctgttcgtcgaacagcacaagcactacctggacgaaatcatcgaacagatcagcgaattcagcaagagagtcatcctggcagacgcaaacctggacaaggtcctgagcgcatacaacaagcacagagacaagccgatcagagaacaggcagaaaacatcatccacctgttcacactgacaaacctgggagcaccggcagcattcaagtacttcgacacaacaatcgacagaaagagatacacaagcacaaaggaagtcctggacgcaacactgatccaccagagcatcacaggactgtacgaaacaagaatcgacctgagccagctgggaggagacggaggaggaagccaggcagcaaagagaagcagaacaaca

SEQ ID NO: 367 - DNA, 4143 bp, Artificial Sequence
  Synthetic: Open reading frame for Cas9 with NLS3 (no start or stop codons; suitable for inclusion in fusion protein coding sequence)
gacaagaagtacagcatcggactggacatcggaacaaacagcgtcggatgggcagtcatcacagacgaatacaaggtcccgagcaagaagttcaaggtcctgggaaacacagacagacacagcatcaagaagaacctgatcggagcactgctgttcgacagcggagaaacagcagaagcaacaagactgaagagaacagcaagaagaagatacacaagaagaaagaacagaatctgctacctgcaggaaatcttcagcaacgaaatggcaaaggtcgacgacagcttcttccacagactggaagaaagcttcctggtcgaagaagacaagaagcacgaaagacacccgatcttcggaaacatcgtcgacgaagtcgcataccacgaaaagtacccgacaatctaccacctgagaaagaagctggtcgacagcacagacaaggcagacctgagactgatctacctggcactggcacacatgatcaagttcagaggacacttcctgatcgaaggagacctgaacccggacaacagcgacgtcgacaagctgttcatccagctggtccagacatacaaccagctgttcgaagaaaacccgatcaacgcaagcggagtcgacgcaaaggcaatcctgagcgcaagactgagcaagagcagaagactggaaaacctgatcgcacagctgccgggagaaaagaagaacggactgttcggaaacctgatcgcactgagcctgggactgacaccgaacttcaagagcaacttcgacctggcagaagacgcaaagctgcagctgagcaaggacacatacgacgacgacctggacaacctgctggcacagatcggagaccagtacgcagacctgttcctggcagcaaagaacctgagcgacgcaatcctgctgagcgacatcctgagagtcaacacagaaatcacaaaggcaccgctgagcgcaagcatgatcaagagatacgacgaacaccaccaggacctgacactgctgaaggcactggtcagacagcagctgccggaaaagtacaaggaaatcttcttcgaccagagcaagaacggatacgcaggatacatcgacggaggagcaagccaggaagaattctacaagttcatcaagccgatcctggaaaagatggacggaacagaagaactgctggtcaagctgaacagagaagacctgctgagaaagcagagaacattcgacaacggaagcatcccgcaccagatccacctgggagaactgcacgcaatcctgagaagacaggaagacttctacccgttcctgaaggacaacagagaaaagatcgaaaagatcctgacattcagaatcccgtactacgtcggaccgctggcaagaggaaacagcagattcgcatggatgacaagaaagagcgaagaaacaatcacaccgtggaacttcgaagaagtcgtcgacaagggagcaagcgcacagagcttcatcgaaagaatgacaaacttcgacaagaacctgccgaacgaaaaggtcctgccgaagcacagcctgctgtacgaatacttcacagtctacaacgaactgacaaaggtcaagtacgtcacagaaggaatgagaaagccggcattcctgagcggagaacagaagaaggcaatcgtcgacctgctgttcaagacaaacagaaaggtcacagtcaagcagctgaaggaagactacttcaagaagatcgaatgcttcgacagcgtcgaaatcagcggagtcgaagacagattcaacgcaagcctgggaacataccacgacctgctgaagatcatcaaggacaaggacttcctggacaacgaagaaaacgaagacatcctggaagacatcgtcctgacactgacactgttcgaagacagagaaatgatcgaagaaagactgaagacatacgcacacctgttcgacgacaaggtcatgaagcagctgaagagaagaagatacacaggatggggaagactgagcagaaagctgatcaacggaatcagagacaagcagagcggaaagacaatcctggacttcctgaagagcgacggattcgcaaacagaaacttcatgcagctgatccacgacgacagcctgacattcaaggaagacatccagaaggcacaggtcagcggacagggagacagcctgcacgaacacatcgcaaacctggcaggaagcccggcaatcaagaagggaatcctgcagacagtcaaggtcgtcgacgaactggtcaaggtcatgggaagacacaagccggaaaacatcgtcatcgaaatggcaagagaaaaccagacaacacagaagggacagaagaacagcagagaaagaatgaagagaatcgaagaaggaatcaaggaactgggaagccagatcctgaaggaacacccggtcgaaaacacacagctgcagaacgaaaagctgtacctgtactacctgcagaacggaagagacatgtacgtcgaccaggaactggacatcaacagactgagcgactacgacgtcgaccacatcgtcccgcagagcttcctgaaggacgacagcatcgacaacaaggtcctgacaagaagcgacaagaacagaggaaagagcgacaacgtcccgagcgaagaagtcgtcaagaagatgaagaactactggagacagctgctgaacgcaaagctgatcacacagagaaagttcgacaacctgacaaaggcagagagaggaggactgagcgaactggacaaggcaggattcatcaagagacagctggtcgaaacaagacagatcacaaagcacgtcgcacagatcctggacagcagaatgaacacaaagtacgacgaaaacgacaagctgatcagagaagtcaaggtcatcacactgaagagcaagctggtcagcgacttcagaaaggacttccagttctacaaggtcagagaaatcaacaactaccaccacgcacacgacgcatacctgaacgcagtcgtcggaacagcactgatcaagaagtacccgaagctggaaagcgaattcgtctacggagactacaaggtctacgacgtcagaaagatgatcgcaaagagcgaacaggaaatcggaaaggcaacagcaaagtacttcttctacagcaacatcatgaacttcttcaagacagaaatcacactggcaaacggagaaatcagaaagagaccgctgatcgaaacaaacggagaaacaggagaaatcgtctgggacaagggaagagacttcgcaacagtcagaaaggtcctgagcatgccgcaggtcaacatcgtcaagaagacagaagtccagacaggaggattcagcaaggaaagcatcctgccgaagagaaacagcgacaagctgatcgcaagaaagaaggactgggacccgaagaagtacggaggattcgacagcccgacagtcgcatacagcgtcctggtcgtcgcaaaggtcgaaaagggaaagagcaagaagctgaagagcgtcaaggaactgctgggaatcacaatcatggaaagaagcagcttcgaaaagaacccgatcgacttcctggaagcaaagggatacaaggaagtcaagaaggacctgatcatcaagctgccgaagtacagcctgttcgaactggaaaacggaagaaagagaatgctggcaagcgcaggagaactgcagaagggaaacgaactggcactgccgagcaagtacgtcaacttcctgtacctggcaagccactacgaaaagctgaagggaagcccggaagacaacgaacagaagcagctgttcgtcgaacagcacaagcactacctggacgaaatcatcgaacagatcagcgaattcagcaagagagtcatcctggcagacgcaaacctggacaaggtcctgagcgcatacaacaagcacagagacaagccgatcagagaacaggcagaaaacatcatccacctgttcacactgacaaacctgggagcaccggcagcattcaagtacttcgacacaacaatcgacagaaagagatacacaagcacaaaggaagtcctggacgcaacactgatccaccagagcatcacaggactgtacgaaacaagaatcgacctgagccagctgggaggagacggaggaggaagcccggcaccggcaaagagagaaagaacaaca

SEQ ID NO: 368 - DNA, 4140 bp, Artificial Sequence
  Synthetic: Open reading frame for Cas9 with NLS4 (no start or stop codons; suitable for inclusion in fusion protein coding sequence)
gacaagaagtacagcatcggactggacatcggaacaaacagcgtcggatgggcagtcatcacagacgaatacaaggtcccgagcaagaagttcaaggtcctgggaaacacagacagacacagcatcaagaagaacctgatcggagcactgctgttcgacagcggagaaacagcagaagcaacaagactgaagagaacagcaagaagaagatacacaagaagaaagaacagaatctgctacctgcaggaaatcttcagcaacgaaatggcaaaggtcgacgacagcttcttccacagactggaagaaagcttcctggtcgaagaagacaagaagcacgaaagacacccgatcttcggaaacatcgtcgacgaagtcgcataccacgaaaagtacccgacaatctaccacctgagaaagaagctggtcgacagcacagacaaggcagacctgagactgatctacctggcactggcacacatgatcaagttcagaggacacttcctgatcgaaggagacctgaacccggacaacagcgacgtcgacaagctgttcatccagctggtccagacatacaaccagctgttcgaagaaaacccgatcaacgcaagcggagtcgacgcaaaggcaatcctgagcgcaagactgagcaagagcagaagactggaaaacctgatcgcacagctgccgggagaaaagaagaacggactgttcggaaacctgatcgcactgagcctgggactgacaccgaacttcaagagcaacttcgacctggcagaagacgcaaagctgcagctgagcaaggacacatacgacgacgacctggacaacctgctggcacagatcggagaccagtacgcagacctgttcctggcagcaaagaacctgagcgacgcaatcctgctgagcgacatcctgagagtcaacacagaaatcacaaaggcaccgctgagcgcaagcatgatcaagagatacgacgaacaccaccaggacctgacactgctgaaggcactggtcagacagcagctgccggaaaagtacaaggaaatcttcttcgaccagagcaagaacggatacgcaggatacatcgacggaggagcaagccaggaagaattctacaagttcatcaagccgatcctggaaaagatggacggaacagaagaactgctggtcaagctgaacagagaagacctgctgagaaagcagagaacattcgacaacggaagcatcccgcaccagatccacctgggagaactgcacgcaatcctgagaagacaggaagacttctacccgttcctgaaggacaacagagaaaagatcgaaaagatcctgacattcagaatcccgtactacgtcggaccgctggcaagaggaaacagcagattcgcatggatgacaagaaagagcgaagaaacaatcacaccgtggaacttcgaagaagtcgtcgacaagggagcaagcgcacagagcttcatcgaaagaatgacaaacttcgacaagaacctgccgaacgaaaaggtcctgccgaagcacagcctgctgtacgaatacttcacagtctacaacgaactgacaaaggtcaagtacgtcacagaaggaatgagaaagccggcattcctgagcggagaacagaagaaggcaatcgtcgacctgctgttcaagacaaacagaaaggtcacagtcaagcagctgaaggaagactacttcaagaagatcgaatgcttcgacagcgtcgaaatcagcggagtcgaagacagattcaacgcaagcctgggaacataccacgacctgctgaagatcatcaaggacaaggacttcctggacaacgaagaaaacgaagacatcctggaagacatcgtcctgacactgacactgttcgaagacagagaaatgatcgaagaaagactgaagacatacgcacacctgttcgacgacaaggtcatgaagcagctgaagagaagaagatacacaggatggggaagactgagcagaaagctgatcaacggaatcagagacaagcagagcggaaagacaatcctggacttcctgaagagcgacggattcgcaaacagaaacttcatgcagctgatccacgacgacagcctgacattcaaggaagacatccagaaggcacaggtcagcggacagggagacagcctgcacgaacacatcgcaaacctggcaggaagcccggcaatcaagaagggaatcctgcagacagtcaaggtcgtcgacgaactggtcaaggtcatgggaagacacaagccggaaaacatcgtcatcgaaatggcaagagaaaaccagacaacacagaagggacagaagaacagcagagaaagaatgaagagaatcgaagaaggaatcaaggaactgggaagccagatcctgaaggaacacccggtcgaaaacacacagctgcagaacgaaaagctgtacctgtactacctgcagaacggaagagacatgtacgtcgaccaggaactggacatcaacagactgagcgactacgacgtcgaccacatcgtcccgcagagcttcctgaaggacgacagcatcgacaacaaggtcctgacaagaagcgacaagaacagaggaaagagcgacaacgtcccgagcgaagaagtcgtcaagaagatgaagaactactggagacagctgctgaacgcaaagctgatcacacagagaaagttcgacaacctgacaaaggcagagagaggaggactgagcgaactggacaaggcaggattcatcaagagacagctggtcgaaacaagacagatcacaaagcacgtcgcacagatcctggacagcagaatgaacacaaagtacgacgaaaacgacaagctgatcagagaagtcaaggtcatcacactgaagagcaagctggtcagcgacttcagaaaggacttccagttctacaaggtcagagaaatcaacaactaccaccacgcacacgacgcatacctgaacgcagtcgtcggaacagcactgatcaagaagtacccgaagctggaaagcgaattcgtctacggagactacaaggtctacgacgtcagaaagatgatcgcaaagagcgaacaggaaatcggaaaggcaacagcaaagtacttcttctacagcaacatcatgaacttcttcaagacagaaatcacactggcaaacggagaaatcagaaagagaccgctgatcgaaacaaacggagaaacaggagaaatcgtctgggacaagggaagagacttcgcaacagtcagaaaggtcctgagcatgccgcaggtcaacatcgtcaagaagacagaagtccagacaggaggattcagcaaggaaagcatcctgccgaagagaaacagcgacaagctgatcgcaagaaagaaggactgggacccgaagaagtacggaggattcgacagcccgacagtcgcatacagcgtcctggtcgtcgcaaaggtcgaaaagggaaagagcaagaagctgaagagcgtcaaggaactgctgggaatcacaatcatggaaagaagcagcttcgaaaagaacccgatcgacttcctggaagcaaagggatacaaggaagtcaagaaggacctgatcatcaagctgccgaagtacagcctgttcgaactggaaaacggaagaaagagaatgctggcaagcgcaggagaactgcagaagggaaacgaactggcactgccgagcaagtacgtcaacttcctgtacctggcaagccactacgaaaagctgaagggaagcccggaagacaacgaacagaagcagctgttcgtcgaacagcacaagcactacctggacgaaatcatcgaacagatcagcgaattcagcaagagagtcatcctggcagacgcaaacctggacaaggtcctgagcgcatacaacaagcacagagacaagccgatcagagaacaggcagaaaacatcatccacctgttcacactgacaaacctgggagcaccggcagcattcaagtacttcgacacaacaatcgacagaaagagatacacaagcacaaaggaagtcctggacgcaacactgatccaccagagcatcacaggactgtacgaaacaagaatcgacctgagccagctgggaggagacggaggaggaagccaggcagcaaagagaccgagaacaaca

SEQ ID NO: 369 - DNA, 4140 bp, Artificial Sequence
  Synthetic: Open reading frame for Cas9 with NLS5 (no start or stop codons; suitable for inclusion in fusion protein coding sequence)
gacaagaagtacagcatcggactggacatcggaacaaacagcgtcggatgggcagtcatcacagacgaatacaaggtcccgagcaagaagttcaaggtcctgggaaacacagacagacacagcatcaagaagaacctgatcggagcactgctgttcgacagcggagaaacagcagaagcaacaagactgaagagaacagcaagaagaagatacacaagaagaaagaacagaatctgctacctgcaggaaatcttcagcaacgaaatggcaaaggtcgacgacagcttcttccacagactggaagaaagcttcctggtcgaagaagacaagaagcacgaaagacacccgatcttcggaaacatcgtcgacgaagtcgcataccacgaaaagtacccgacaatctaccacctgagaaagaagctggtcgacagcacagacaaggcagacctgagactgatctacctggcactggcacacatgatcaagttcagaggacacttcctgatcgaaggagacctgaacccggacaacagcgacgtcgacaagctgttcatccagctggtccagacatacaaccagctgttcgaagaaaacccgatcaacgcaagcggagtcgacgcaaaggcaatcctgagcgcaagactgagcaagagcagaagactggaaaacctgatcgcacagctgccgggagaaaagaagaacggactgttcggaaacctgatcgcactgagcctgggactgacaccgaacttcaagagcaacttcgacctggcagaagacgcaaagctgcagctgagcaaggacacatacgacgacgacctggacaacctgctggcacagatcggagaccagtacgcagacctgttcctggcagcaaagaacctgagcgacgcaatcctgctgagcgacatcctgagagtcaacacagaaatcacaaaggcaccgctgagcgcaagcatgatcaagagatacgacgaacaccaccaggacctgacactgctgaaggcactggtcagacagcagctgccggaaaagtacaaggaaatcttcttcgaccagagcaagaacggatacgcaggatacatcgacggaggagcaagccaggaagaattctacaagttcatcaagccgatcctggaaaagatggacggaacagaagaactgctggtcaagctgaacagagaagacctgctgagaaagcagagaacattcgacaacggaagcatcccgcaccagatccacctgggagaactgcacgcaatcctgagaagacaggaagacttctacccgttcctgaaggacaacagagaaaagatcgaaaagatcctgacattcagaatcccgtactacgtcggaccgctggcaagaggaaacagcagattcgcatggatgacaagaaagagcgaagaaacaatcacaccgtggaacttcgaagaagtcgtcgacaagggagcaagcgcacagagcttcatcgaaagaatgacaaacttcgacaagaacctgccgaacgaaaaggtcctgccgaagcacagcctgctgtacgaatacttcacagtctacaacgaactgacaaaggtcaagtacgtcacagaaggaatgagaaagccggcattcctgagcggagaacagaagaaggcaatcgtcgacctgctgttcaagacaaacagaaaggtcacagtcaagcagctgaaggaagactacttcaagaagatcgaatgcttcgacagcgtcgaaatcagcggagtcgaagacagattcaacgcaagcctgggaacataccacgacctgctgaagatcatcaaggacaaggacttcctggacaacgaagaaaacgaagacatcctggaagacatcgtcctgacactgacactgttcgaagacagagaaatgatcgaagaaagactgaagacatacgcacacctgttcgacgacaaggtcatgaagcagctgaagagaagaagatacacaggatggggaagactgagcagaaagctgatcaacggaatcagagacaagcagagcggaaagacaatcctggacttcctgaagagcgacggattcgcaaacagaaacttcatgcagctgatccacgacgacagcctgacattcaaggaagacatccagaaggcacaggtcagcggacagggagacagcctgcacgaacacatcgcaaacctggcaggaagcccggcaatcaagaagggaatcctgcagacagtcaaggtcgtcgacgaactggtcaaggtcatgggaagacacaagccggaaaacatcgtcatcgaaatggcaagagaaaaccagacaacacagaagggacagaagaacagcagagaaagaatgaagagaatcgaagaaggaatcaaggaactgggaagccagatcctgaaggaacacccggtcgaaaacacacagctgcagaacgaaaagctgtacctgtactacctgcagaacggaagagacatgtacgtcgaccaggaactggacatcaacagactgagcgactacgacgtcgaccacatcgtcccgcagagcttcctgaaggacgacagcatcgacaacaaggtcctgacaagaagcgacaagaacagaggaaagagcgacaacgtcccgagcgaagaagtcgtcaagaagatgaagaactactggagacagctgctgaacgcaaagctgatcacacagagaaagttcgacaacctgacaaaggcagagagaggaggactgagcgaactggacaaggcaggattcatcaagagacagctggtcgaaacaagacagatcacaaagcacgtcgcacagatcctggacagcagaatgaacacaaagtacgacgaaaacgacaagctgatcagagaagtcaaggtcatcacactgaagagcaagctggtcagcgacttcagaaaggacttccagttctacaaggtcagagaaatcaacaactaccaccacgcacacgacgcatacctgaacgcagtcgtcggaacagcactgatcaagaagtacccgaagctggaaagcgaattcgtctacggagactacaaggtctacgacgtcagaaagatgatcgcaaagagcgaacaggaaatcggaaaggcaacagcaaagtacttcttctacagcaacatcatgaacttcttcaagacagaaatcacactggcaaacggagaaatcagaaagagaccgctgatcgaaacaaacggagaaacaggagaaatcgtctgggacaagggaagagacttcgcaacagtcagaaaggtcctgagcatgccgcaggtcaacatcgtcaagaagacagaagtccagacaggaggattcagcaaggaaagcatcctgccgaagagaaacagcgacaagctgatcgcaagaaagaaggactgggacccgaagaagtacggaggattcgacagcccgacagtcgcatacagcgtcctggtcgtcgcaaaggtcgaaaagggaaagagcaagaagctgaagagcgtcaaggaactgctgggaatcacaatcatggaaagaagcagcttcgaaaagaacccgatcgacttcctggaagcaaagggatacaaggaagtcaagaaggacctgatcatcaagctgccgaagtacagcctgttcgaactggaaaacggaagaaagagaatgctggcaagcgcaggagaactgcagaagggaaacgaactggcactgccgagcaagtacgtcaacttcctgtacctggcaagccactacgaaaagctgaagggaagcccggaagacaacgaacagaagcagctgttcgtcgaacagcacaagcactacctggacgaaatcatcgaacagatcagcgaattcagcaagagagtcatcctggcagacgcaaacctggacaaggtcctgagcgcatacaacaagcacagagacaagccgatcagagaacaggcagaaaacatcatccacctgttcacactgacaaacctgggagcaccggcagcattcaagtacttcgacacaacaatcgacagaaagagatacacaagcacaaaggaagtcctggacgcaacactgatccaccagagcatcacaggactgtacgaaacaagaatcgacctgagccagctgggaggagacggaggaggaagcagagcagcaaagagaccgagaacaaca

SEQ ID NO: 370 - DNA, 4146 bp, Artificial Sequence
  Synthetic: Open reading frame for Cas9 with NLS6 (no start or stop codons; suitable for inclusion in fusion protein coding sequence)
gacaagaagtacagcatcggactggacatcggaacaaacagcgtcggatgggcagtcatcacagacgaatacaaggtcccgagcaagaagttcaaggtcctgggaaacacagacagacacagcatcaagaagaacctgatcggagcactgctgttcgacagcggagaaacagcagaagcaacaagactgaagagaacagcaagaagaagatacacaagaagaaagaacagaatctgctacctgcaggaaatcttcagcaacgaaatggcaaaggtcgacgacagcttcttccacagactggaagaaagcttcctggtcgaagaagacaagaagcacgaaagacacccgatcttcggaaacatcgtcgacgaagtcgcataccacgaaaagtacccgacaatctaccacctgagaaagaagctggtcgacagcacagacaaggcagacctgagactgatctacctggcactggcacacatgatcaagttcagaggacacttcctgatcgaaggagacctgaacccggacaacagcgacgtcgacaagctgttcatccagctggtccagacatacaaccagctgttcgaagaaaacccgatcaacgcaagcggagtcgacgcaaaggcaatcctgagcgcaagactgagcaagagcagaagactggaaaacctgatcgcacagctgccgggagaaaagaagaacggactgttcggaaacctgatcgcactgagcctgggactgacaccgaacttcaagagcaacttcgacctggcagaagacgcaaagctgcagctgagcaaggacacatacgacgacgacctggacaacctgctggcacagatcggagaccagtacgcagacctgttcctggcagcaaagaacctgagcgacgcaatcctgctgagcgacatcctgagagtcaacacagaaatcacaaaggcaccgctgagcgcaagcatgatcaagagatacgacgaacaccaccaggacctgacactgctgaaggcactggtcagacagcagctgccggaaaagtacaaggaaatcttcttcgaccagagcaagaacggatacgcaggatacatcgacggaggagcaagccaggaagaattctacaagttcatcaagccgatcctggaaaagatggacggaacagaagaactgctggtcaagctgaacagagaagacctgctgagaaagcagagaacattcgacaacggaagcatcccgcaccagatccacctgggagaactgcacgcaatcctgagaagacaggaagacttctacccgttcctgaaggacaacagagaaaagatcgaaaagatcctgacattcagaatcccgtactacgtcggaccgctggcaagaggaaacagcagattcgcatggatgacaagaaagagcgaagaaacaatcacaccgtggaacttcgaagaagtcgtcgacaagggagcaagcgcacagagcttcatcgaaagaatgacaaacttcgacaagaacctgccgaacgaaaaggtcctgccgaagcacagcctgctgtacgaatacttcacagtctacaacgaactgacaaaggtcaagtacgtcacagaaggaatgagaaagccggcattcctgagcggagaacagaagaaggcaatcgtcgacctgctgttcaagacaaacagaaaggtcacagtcaagcagctgaaggaagactacttcaagaagatcgaatgcttcgacagcgtcgaaatcagcggagtcgaagacagattcaacgcaagcctgggaacataccacgacctgctgaagatcatcaaggacaaggacttcctggacaacgaagaaaacgaagacatcctggaagacatcgtcctgacactgacactgttcgaagacagagaaatgatcgaagaaagactgaagacatacgcacacctgttcgacgacaaggtcatgaagcagctgaagagaagaagatacacaggatggggaagactgagcagaaagctgatcaacggaatcagagacaagcagagcggaaagacaatcctggacttcctgaagagcgacggattcgcaaacagaaacttcatgcagctgatccacgacgacagcctgacattcaaggaagacatccagaaggcacaggtcagcggacagggagacagcctgcacgaacacatcgcaaacctggcaggaagcccggcaatcaagaagggaatcctgcagacagtcaaggtcgtcgacgaactggtcaaggtcatgggaagacacaagccggaaaacatcgtcatcgaaatggcaagagaaaaccagacaacacagaagggacagaagaacagcagagaaagaatgaagagaatcgaagaaggaatcaaggaactgggaagccagatcctgaaggaacacccggtcgaaaacacacagctgcagaacgaaaagctgtacctgtactacctgcagaacggaagagacatgtacgtcgaccaggaactggacatcaacagactgagcgactacgacgtcgaccacatcgtcccgcagagcttcctgaaggacgacagcatcgacaacaaggtcctgacaagaagcgacaagaacagaggaaagagcgacaacgtcccgagcgaagaagtcgtcaagaagatgaagaactactggagacagctgctgaacgcaaagctgatcacacagagaaagttcgacaacctgacaaaggcagagagaggaggactgagcgaactggacaaggcaggattcatcaagagacagctggtcgaaacaagacagatcacaaagcacgtcgcacagatcctggacagcagaatgaacacaaagtacgacgaaaacgacaagctgatcagagaagtcaaggtcatcacactgaagagcaagctggtcagcgacttcagaaaggacttccagttctacaaggtcagagaaatcaacaactaccaccacgcacacgacgcatacctgaacgcagtcgtcggaacagcactgatcaagaagtacccgaagctggaaagcgaattcgtctacggagactacaaggtctacgacgtcagaaagatgatcgcaaagagcgaacaggaaatcggaaaggcaacagcaaagtacttcttctacagcaacatcatgaacttcttcaagacagaaatcacactggcaaacggagaaatcagaaagagaccgctgatcgaaacaaacggagaaacaggagaaatcgtctgggacaagggaagagacttcgcaacagtcagaaaggtcctgagcatgccgcaggtcaacatcgtcaagaagacagaagtccagacaggaggattcagcaaggaaagcatcctgccgaagagaaacagcgacaagctgatcgcaagaaagaaggactgggacccgaagaagtacggaggattcgacagcccgacagtcgcatacagcgtcctggtcgtcgcaaaggtcgaaaagggaaagagcaagaagctgaagagcgtcaaggaactgctgggaatcacaatcatggaaagaagcagcttcgaaaagaacccgatcgacttcctggaagcaaagggatacaaggaagtcaagaaggacctgatcatcaagctgccgaagtacagcctgttcgaactggaaaacggaagaaagagaatgctggcaagcgcaggagaactgcagaagggaaacgaactggcactgccgagcaagtacgtcaacttcctgtacctggcaagccactacgaaaagctgaagggaagcccggaagacaacgaacagaagcagctgttcgtcgaacagcacaagcactacctggacgaaatcatcgaacagatcagcgaattcagcaagagagtcatcctggcagacgcaaacctggacaaggtcctgagcgcatacaacaagcacagagacaagccgatcagagaacaggcagaaaacatcatccacctgttcacactgacaaacctgggagcaccggcagcattcaagtacttcgacacaacaatcgacagaaagagatacacaagcacaaaggaagtcctggacgcaacactgatccaccagagcatcacaggactgtacgaaacaagaatcgacctgagccagctgggaggagacggaggaggaagcgcagcagcaaagagaagctggagcatggcagca

SEQ ID NO: 371 - DNA, 4146 bp, Artificial Sequence
  Synthetic: Open reading frame for Cas9 with NLS7 (no start or stop codons; suitable for inclusion in fusion protein coding sequence)
gacaagaagtacagcatcggactggacatcggaacaaacagcgtcggatgggcagtcatcacagacgaatacaaggtcccgagcaagaagttcaaggtcctgggaaacacagacagacacagcatcaagaagaacctgatcggagcactgctgttcgacagcggagaaacagcagaagcaacaagactgaagagaacagcaagaagaagatacacaagaagaaagaacagaatctgctacctgcaggaaatcttcagcaacgaaatggcaaaggtcgacgacagcttcttccacagactggaagaaagcttcctggtcgaagaagacaagaagcacgaaagacacccgatcttcggaaacatcgtcgacgaagtcgcataccacgaaaagtacccgacaatctaccacctgagaaagaagctggtcgacagcacagacaaggcagacctgagactgatctacctggcactggcacacatgatcaagttcagaggacacttcctgatcgaaggagacctgaacccggacaacagcgacgtcgacaagctgttcatccagctggtccagacatacaaccagctgttcgaagaaaacccgatcaacgcaagcggagtcgacgcaaaggcaatcctgagcgcaagactgagcaagagcagaagactggaaaacctgatcgcacagctgccgggagaaaagaagaacggactgttcggaaacctgatcgcactgagcctgggactgacaccgaacttcaagagcaacttcgacctggcagaagacgcaaagctgcagctgagcaaggacacatacgacgacgacctggacaacctgctggcacagatcggagaccagtacgcagacctgttcctggcagcaaagaacctgagcgacgcaatcctgctgagcgacatcctgagagtcaacacagaaatcacaaaggcaccgctgagcgcaagcatgatcaagagatacgacgaacaccaccaggacctgacactgctgaaggcactggtcagacagcagctgccggaaaagtacaaggaaatcttcttcgaccagagcaagaacggatacgcaggatacatcgacggaggagcaagccaggaagaattctacaagttcatcaagccgatcctggaaaagatggacggaacagaagaactgctggtcaagctgaacagagaagacctgctgagaaagcagagaacattcgacaacggaagcatcccgcaccagatccacctgggagaactgcacgcaatcctgagaagacaggaagacttctacccgttcctgaaggacaacagagaaaagatcgaaaagatcctgacattcagaatcccgtactacgtcggaccgctggcaagaggaaacagcagattcgcatggatgacaagaaagagcgaagaaacaatcacaccgtggaacttcgaagaagtcgtcgacaagggagcaagcgcacagagcttcatcgaaagaatgacaaacttcgacaagaacctgccgaacgaaaaggtcctgccgaagcacagcctgctgtacgaatacttcacagtctacaacgaactgacaaaggtcaagtacgtcacagaaggaatgagaaagccggcattcctgagcggagaacagaagaaggcaatcgtcgacctgctgttcaagacaaacagaaaggtcacagtcaagcagctgaaggaagactacttcaagaagatcgaatgcttcgacagcgtcgaaatcagcggagtcgaagacagattcaacgcaagcctgggaacataccacgacctgctgaagatcatcaaggacaaggacttcctggacaacgaagaaaacgaagacatcctggaagacatcgtcctgacactgacactgttcgaagacagagaaatgatcgaagaaagactgaagacatacgcacacctgttcgacgacaaggtcatgaagcagctgaagagaagaagatacacaggatggggaagactgagcagaaagctgatcaacggaatcagagacaagcagagcggaaagacaatcctggacttcctgaagagcgacggattcgcaaacagaaacttcatgcagctgatccacgacgacagcctgacattcaaggaagacatccagaaggcacaggtcagcggacagggagacagcctgcacgaacacatcgcaaacctggcaggaagcccggcaatcaagaagggaatcctgcagacagtcaaggtcgtcgacgaactggtcaaggtcatgggaagacacaagccggaaaacatcgtcatcgaaatggcaagagaaaaccagacaacacagaagggacagaagaacagcagagaaagaatgaagagaatcgaagaaggaatcaaggaactgggaagccagatcctgaaggaacacccggtcgaaaacacacagctgcagaacgaaaagctgtacctgtactacctgcagaacggaagagacatgtacgtcgaccaggaactggacatcaacagactgagcgactacgacgtcgaccacatcgtcccgcagagcttcctgaaggacgacagcatcgacaacaaggtcctgacaagaagcgacaagaacagaggaaagagcgacaacgtcccgagcgaagaagtcgtcaagaagatgaagaactactggagacagctgctgaacgcaaagctgatcacacagagaaagttcgacaacctgacaaaggcagagagaggaggactgagcgaactggacaaggcaggattcatcaagagacagctggtcgaaacaagacagatcacaaagcacgtcgcacagatcctggacagcagaatgaacacaaagtacgacgaaaacgacaagctgatcagagaagtcaaggtcatcacactgaagagcaagctggtcagcgacttcagaaaggacttccagttctacaaggtcagagaaatcaacaactaccaccacgcacacgacgcatacctgaacgcagtcgtcggaacagcactgatcaagaagtacccgaagctggaaagcgaattcgtctacggagactacaaggtctacgacgtcagaaagatgatcgcaaagagcgaacaggaaatcggaaaggcaacagcaaagtacttcttctacagcaacatcatgaacttcttcaagacagaaatcacactggcaaacggagaaatcagaaagagaccgctgatcgaaacaaacggagaaacaggagaaatcgtctgggacaagggaagagacttcgcaacagtcagaaaggtcctgagcatgccgcaggtcaacatcgtcaagaagacagaagtccagacaggaggattcagcaaggaaagcatcctgccgaagagaaacagcgacaagctgatcgcaagaaagaaggactgggacccgaagaagtacggaggattcgacagcccgacagtcgcatacagcgtcctggtcgtcgcaaaggtcgaaaagggaaagagcaagaagctgaagagcgtcaaggaactgctgggaatcacaatcatggaaagaagcagcttcgaaaagaacccgatcgacttcctggaagcaaagggatacaaggaagtcaagaaggacctgatcatcaagctgccgaagtacagcctgttcgaactggaaaacggaagaaagagaatgctggcaagcgcaggagaactgcagaagggaaacgaactggcactgccgagcaagtacgtcaacttcctgtacctggcaagccactacgaaaagctgaagggaagcccggaagacaacgaacagaagcagctgttcgtcgaacagcacaagcactacctggacgaaatcatcgaacagatcagcgaattcagcaagagagtcatcctggcagacgcaaacctggacaaggtcctgagcgcatacaacaagcacagagacaagccgatcagagaacaggcagaaaacatcatccacctgttcacactgacaaacctgggagcaccggcagcattcaagtacttcgacacaacaatcgacagaaagagatacacaagcacaaaggaagtcctggacgcaacactgatccaccagagcatcacaggactgtacgaaacaagaatcgacctgagccagctgggaggagacggaggaggaagcgcagcagcaaagagagtctggagcatggcattc

SEQ ID NO: 372 - DNA, 4146 bp, Artificial Sequence
  Synthetic: Open reading frame for Cas9 with NLS8 (no start or stop codons; suitable for inclusion in fusion protein coding sequence)
gacaagaagtacagcatcggactggacatcggaacaaacagcgtcggatgggcagtcatcacagacgaatacaaggtcccgagcaagaagttcaaggtcctgggaaacacagacagacacagcatcaagaagaacctgatcggagcactgctgttcgacagcggagaaacagcagaagcaacaagactgaagagaacagcaagaagaagatacacaagaagaaagaacagaatctgctacctgcaggaaatcttcagcaacgaaatggcaaaggtcgacgacagcttcttccacagactggaagaaagcttcctggtcgaagaagacaagaagcacgaaagacacccgatcttcggaaacatcgtcgacgaagtcgcataccacgaaaagtacccgacaatctaccacctgagaaagaagctggtcgacagcacagacaaggcagacctgagactgatctacctggcactggcacacatgatcaagttcagaggacacttcctgatcgaaggagacctgaacccggacaacagcgacgtcgacaagctgttcatccagctggtccagacatacaaccagctgttcgaagaaaacccgatcaacgcaagcggagtcgacgcaaaggcaatcctgagcgcaagactgagcaagagcagaagactggaaaacctgatcgcacagctgccgggagaaaagaagaacggactgttcggaaacctgatcgcactgagcctgggactgacaccgaacttcaagagcaacttcgacctggcagaagacgcaaagctgcagctgagcaaggacacatacgacgacgacctggacaacctgctggcacagatcggagaccagtacgcagacctgttcctggcagcaaagaacctgagcgacgcaatcctgctgagcgacatcctgagagtcaacacagaaatcacaaaggcaccgctgagcgcaagcatgatcaagagatacgacgaacaccaccaggacctgacactgctgaaggcactggtcagacagcagctgccggaaaagtacaaggaaatcttcttcgaccagagcaagaacggatacgcaggatacatcgacggaggagcaagccaggaagaattctacaagttcatcaagccgatcctggaaaagatggacggaacagaagaactgctggtcaagctgaacagagaagacctgctgagaaagcagagaacattcgacaacggaagcatcccgcaccagatccacctgggagaactgcacgcaatcctgagaagacaggaagacttctacccgttcctgaaggacaacagagaaaagatcgaaaagatcctgacattcagaatcccgtactacgtcggaccgctggcaagaggaaacagcagattcgcatggatgacaagaaagagcgaagaaacaatcacaccgtggaacttcgaagaagtcgtcgacaagggagcaagcgcacagagcttcatcgaaagaatgacaaacttcgacaagaacctgccgaacgaaaaggtcctgccgaagcacagcctgctgtacgaatacttcacagtctacaacgaactgacaaaggtcaagtacgtcacagaaggaatgagaaagccggcattcctgagcggagaacagaagaaggcaatcgtcgacctgctgttcaagacaaacagaaaggtcacagtcaagcagctgaaggaagactacttcaagaagatcgaatgcttcgacagcgtcgaaatcagcggagtcgaagacagattcaacgcaagcctgggaacataccacgacctgctgaagatcatcaaggacaaggacttcctggacaacgaagaaaacgaagacatcctggaagacatcgtcctgacactgacactgttcgaagacagagaaatgatcgaagaaagactgaagacatacgcacacctgttcgacgacaaggtcatgaagcagctgaagagaagaagatacacaggatggggaagactgagcagaaagctgatcaacggaatcagagacaagcagagcggaaagacaatcctggacttcctgaagagcgacggattcgcaaacagaaacttcatgcagctgatccacgacgacagcctgacattcaaggaagacatccagaaggcacaggtcagcggacagggagacagcctgcacgaacacatcgcaaacctggcaggaagcccggcaatcaagaagggaatcctgcagacagtcaaggtcgtcgacgaactggtcaaggtcatgggaagacacaagccggaaaacatcgtcatcgaaatggcaagagaaaaccagacaacacagaagggacagaagaacagcagagaaagaatgaagagaatcgaagaaggaatcaaggaactgggaagccagatcctgaaggaacacccggtcgaaaacacacagctgcagaacgaaaagctgtacctgtactacctgcagaacggaagagacatgtacgtcgaccaggaactggacatcaacagactgagcgactacgacgtcgaccacatcgtcccgcagagcttcctgaaggacgacagcatcgacaacaaggtcctgacaagaagcgacaagaacagaggaaagagcgacaacgtcccgagcgaagaagtcgtcaagaagatgaagaactactggagacagctgctgaacgcaaagctgatcacacagagaaagttcgacaacctgacaaaggcagagagaggaggactgagcgaactggacaaggcaggattcatcaagagacagctggtcgaaacaagacagatcacaaagcacgtcgcacagatcctggacagcagaatgaacacaaagtacgacgaaaacgacaagctgatcagagaagtcaaggtcatcacactgaagagcaagctggtcagcgacttcagaaaggacttccagttctacaaggtcagagaaatcaacaactaccaccacgcacacgacgcatacctgaacgcagtcgtcggaacagcactgatcaagaagtacccgaagctggaaagcgaattcgtctacggagactacaaggtctacgacgtcagaaagatgatcgcaaagagcgaacaggaaatcggaaaggcaacagcaaagtacttcttctacagcaacatcatgaacttcttcaagacagaaatcacactggcaaacggagaaatcagaaagagaccgctgatcgaaacaaacggagaaacaggagaaatcgtctgggacaagggaagagacttcgcaacagtcagaaaggtcctgagcatgccgcaggtcaacatcgtcaagaagacagaagtccagacaggaggattcagcaaggaaagcatcctgccgaagagaaacagcgacaagctgatcgcaagaaagaaggactgggacccgaagaagtacggaggattcgacagcccgacagtcgcatacagcgtcctggtcgtcgcaaaggtcgaaaagggaaagagcaagaagctgaagagcgtcaaggaactgctgggaatcacaatcatggaaagaagcagcttcgaaaagaacccgatcgacttcctggaagcaaagggatacaaggaagtcaagaaggacctgatcatcaagctgccgaagtacagcctgttcgaactggaaaacggaagaaagagaatgctggcaagcgcaggagaactgcagaagggaaacgaactggcactgccgagcaagtacgtcaacttcctgtacctggcaagccactacgaaaagctgaagggaagcccggaagacaacgaacagaagcagctgttcgtcgaacagcacaagcactacctggacgaaatcatcgaacagatcagcgaattcagcaagagagtcatcctggcagacgcaaacctggacaaggtcctgagcgcatacaacaagcacagagacaagccgatcagagaacaggcagaaaacatcatccacctgttcacactgacaaacctgggagcaccggcagcattcaagtacttcgacacaacaatcgacagaaagagatacacaagcacaaaggaagtcctggacgcaacactgatccaccagagcatcacaggactgtacgaaacaagaatcgacctgagccagctgggaggagacggaggaggaagcgcagcagcaaagagaagctggagcatggcattc

SEQ ID NO: 373 - DNA, 4143 bp, Artificial Sequence
  Synthetic: Open reading frame for Cas9 with NLS9 (no start or stop codons; suitable for inclusion in fusion protein coding sequence)
gacaagaagtacagcatcggactggacatcggaacaaacagcgtcggatgggcagtcatcacagacgaatacaaggtcccgagcaagaagttcaaggtcctgggaaacacagacagacacagcatcaagaagaacctgatcggagcactgctgttcgacagcggagaaacagcagaagcaacaagactgaagagaacagcaagaagaagatacacaagaagaaagaacagaatctgctacctgcaggaaatcttcagcaacgaaatggcaaaggtcgacgacagcttcttccacagactggaagaaagcttcctggtcgaagaagacaagaagcacgaaagacacccgatcttcggaaacatcgtcgacgaagtcgcataccacgaaaagtacccgacaatctaccacctgagaaagaagctggtcgacagcacagacaaggcagacctgagactgatctacctggcactggcacacatgatcaagttcagaggacacttcctgatcgaaggagacctgaacccggacaacagcgacgtcgacaagctgttcatccagctggtccagacatacaaccagctgttcgaagaaaacccgatcaacgcaagcggagtcgacgcaaaggcaatcctgagcgcaagactgagcaagagcagaagactggaaaacctgatcgcacagctgccgggagaaaagaagaacggactgttcggaaacctgatcgcactgagcctgggactgacaccgaacttcaagagcaacttcgacctggcagaagacgcaaagctgcagctgagcaaggacacatacgacgacgacctggacaacctgctggcacagatcggagaccagtacgcagacctgttcctggcagcaaagaacctgagcgacgcaatcctgctgagcgacatcctgagagtcaacacagaaatcacaaaggcaccgctgagcgcaagcatgatcaagagatacgacgaacaccaccaggacctgacactgctgaaggcactggtcagacagcagctgccggaaaagtacaaggaaatcttcttcgaccagagcaagaacggatacgcaggatacatcgacggaggagcaagccaggaagaattctacaagttcatcaagccgatcctggaaaagatggacggaacagaagaactgctggtcaagctgaacagagaagacctgctgagaaagcagagaacattcgacaacggaagcatcccgcaccagatccacctgggagaactgcacgcaatcctgagaagacaggaagacttctacccgttcctgaaggacaacagagaaaagatcgaaaagatcctgacattcagaatcccgtactacgtcggaccgctggcaagaggaaacagcagattcgcatggatgacaagaaagagcgaagaaacaatcacaccgtggaacttcgaagaagtcgtcgacaagggagcaagcgcacagagcttcatcgaaagaatgacaaacttcgacaagaacctgccgaacgaaaaggtcctgccgaagcacagcctgctgtacgaatacttcacagtctacaacgaactgacaaaggtcaagtacgtcacagaaggaatgagaaagccggcattcctgagcggagaacagaagaaggcaatcgtcgacctgctgttcaagacaaacagaaaggtcacagtcaagcagctgaaggaagactacttcaagaagatcgaatgcttcgacagcgtcgaaatcagcggagtcgaagacagattcaacgcaagcctgggaacataccacgacctgctgaagatcatcaaggacaaggacttcctggacaacgaagaaaacgaagacatcctggaagacatcgtcctgacactgacactgttcgaagacagagaaatgatcgaagaaagactgaagacatacgcacacctgttcgacgacaaggtcatgaagcagctgaagagaagaagatacacaggatggggaagactgagcagaaagctgatcaacggaatcagagacaagcagagcggaaagacaatcctggacttcctgaagagcgacggattcgcaaacagaaacttcatgcagctgatccacgacgacagcctgacattcaaggaagacatccagaaggcacaggtcagcggacagggagacagcctgcacgaacacatcgcaaacctggcaggaagcccggcaatcaagaagggaatcctgcagacagtcaaggtcgtcgacgaactggtcaaggtcatgggaagacacaagccggaaaacatcgtcatcgaaatggcaagagaaaaccagacaacacagaagggacagaagaacagcagagaaagaatgaagagaatcgaagaaggaatcaaggaactgggaagccagatcctgaaggaacacccggtcgaaaacacacagctgcagaacgaaaagctgtacctgtactacctgcagaacggaagagacatgtacgtcgaccaggaactggacatcaacagactgagcgactacgacgtcgaccacatcgtcccgcagagcttcctgaaggacgacagcatcgacaacaaggtcctgacaagaagcgacaagaacagaggaaagagcgacaacgtcccgagcgaagaagtcgtcaagaagatgaagaactactggagacagctgctgaacgcaaagctgatcacacagagaaagttcgacaacctgacaaaggcagagagaggaggactgagcgaactggacaaggcaggattcatcaagagacagctggtcgaaacaagacagatcacaaagcacgtcgcacagatcctggacagcagaatgaacacaaagtacgacgaaaacgacaagctgatcagagaagtcaaggtcatcacactgaagagcaagctggtcagcgacttcagaaaggacttccagttctacaaggtcagagaaatcaacaactaccaccacgcacacgacgcatacctgaacgcagtcgtcggaacagcactgatcaagaagtacccgaagctggaaagcgaattcgtctacggagactacaaggtctacgacgtcagaaagatgatcgcaaagagcgaacaggaaatcggaaaggcaacagcaaagtacttcttctacagcaacatcatgaacttcttcaagacagaaatcacactggcaaacggagaaatcagaaagagaccgctgatcgaaacaaacggagaaacaggagaaatcgtctgggacaagggaagagacttcgcaacagtcagaaaggtcctgagcatgccgcaggtcaacatcgtcaagaagacagaagtccagacaggaggattcagcaaggaaagcatcctgccgaagagaaacagcgacaagctgatcgcaagaaagaaggactgggacccgaagaagtacggaggattcgacagcccgacagtcgcatacagcgtcctggtcgtcgcaaaggtcgaaaagggaaagagcaagaagctgaagagcgtcaaggaactgctgggaatcacaatcatggaaagaagcagcttcgaaaagaacccgatcgacttcctggaagcaaagggatacaaggaagtcaagaaggacctgatcatcaagctgccgaagtacagcctgttcgaactggaaaacggaagaaagagaatgctggcaagcgcaggagaactgcagaagggaaacgaactggcactgccgagcaagtacgtcaacttcctgtacctggcaagccactacgaaaagctgaagggaagcccggaagacaacgaacagaagcagctgttcgtcgaacagcacaagcactacctggacgaaatcatcgaacagatcagcgaattcagcaagagagtcatcctggcagacgcaaacctggacaaggtcctgagcgcatacaacaagcacagagacaagccgatcagagaacaggcagaaaacatcatccacctgttcacactgacaaacctgggagcaccggcagcattcaagtacttcgacacaacaatcgacagaaagagatacacaagcacaaaggaagtcctggacgcaacactgatccaccagagcatcacaggactgtacgaaacaagaatcgacctgagccagctgggaggagacggaggaggaagcgcagcagcaaagagaaagtacttcgcagca

SEQ ID NO: 374 - DNA, 4143 bp, Artificial Sequence
  Synthetic: Open reading frame for Cas9 with NLS10 (no start or stop codons; suitable for inclusion in fusion protein coding sequence)
gacaagaagtacagcatcggactggacatcggaacaaacagcgtcggatgggcagtcatcacagacgaatacaaggtcccgagcaagaagttcaaggtcctgggaaacacagacagacacagcatcaagaagaacctgatcggagcactgctgttcgacagcggagaaacagcagaagcaacaagactgaagagaacagcaagaagaagatacacaagaagaaagaacagaatctgctacctgcaggaaatcttcagcaacgaaatggcaaaggtcgacgacagcttcttccacagactggaagaaagcttcctggtcgaagaagacaagaagcacgaaagacacccgatcttcggaaacatcgtcgacgaagtcgcataccacgaaaagtacccgacaatctaccacctgagaaagaagctggtcgacagcacagacaaggcagacctgagactgatctacctggcactggcacacatgatcaagttcagaggacacttcctgatcgaaggagacctgaacccggacaacagcgacgtcgacaagctgttcatccagctggtccagacatacaaccagctgttcgaagaaaacccgatcaacgcaagcggagtcgacgcaaaggcaatcctgagcgcaagactgagcaagagcagaagactggaaaacctgatcgcacagctgccgggagaaaagaagaacggactgttcggaaacctgatcgcactgagcctgggactgacaccgaacttcaagagcaacttcgacctggcagaagacgcaaagctgcagctgagcaaggacacatacgacgacgacctggacaacctgctggcacagatcggagaccagtacgcagacctgttcctggcagcaaagaacctgagcgacgcaatcctgctgagcgacatcctgagagtcaacacagaaatcacaaaggcaccgctgagcgcaagcatgatcaagagatacgacgaacaccaccaggacctgacactgctgaaggcactggtcagacagcagctgccggaaaagtacaaggaaatcttcttcgaccagagcaagaacggatacgcaggatacatcgacggaggagcaagccaggaagaattctacaagttcatcaagccgatcctggaaaagatggacggaacagaagaactgctggtcaagctgaacagagaagacctgctgagaaagcagagaacattcgacaacggaagcatcccgcaccagatccacctgggagaactgcacgcaatcctgagaagacaggaagacttctacccgttcctgaaggacaacagagaaaagatcgaaaagatcctgacattcagaatcccgtactacgtcggaccgctggcaagaggaaacagcagattcgcatggatgacaagaaagagcgaagaaacaatcacaccgtggaacttcgaagaagtcgtcgacaagggagcaagcgcacagagcttcatcgaaagaatgacaaacttcgacaagaacctgccgaacgaaaaggtcctgccgaagcacagcctgctgtacgaatacttcacagtctacaacgaactgacaaaggtcaagtacgtcacagaaggaatgagaaagccggcattcctgagcggagaacagaagaaggcaatcgtcgacctgctgttcaagacaaacagaaaggtcacagtcaagcagctgaaggaagactacttcaagaagatcgaatgcttcgacagcgtcgaaatcagcggagtcgaagacagattcaacgcaagcctgggaacataccacgacctgctgaagatcatcaaggacaaggacttcctggacaacgaagaaaacgaagacatcctggaagacatcgtcctgacactgacactgttcgaagacagagaaatgatcgaagaaagactgaagacatacgcacacctgttcgacgacaaggtcatgaagcagctgaagagaagaagatacacaggatggggaagactgagcagaaagctgatcaacggaatcagagacaagcagagcggaaagacaatcctggacttcctgaagagcgacggattcgcaaacagaaacttcatgcagctgatccacgacgacagcctgacattcaaggaagacatccagaaggcacaggtcagcggacagggagacagcctgcacgaacacatcgcaaacctggcaggaagcccggcaatcaagaagggaatcctgcagacagtcaaggtcgtcgacgaactggtcaaggtcatgggaagacacaagccggaaaacatcgtcatcgaaatggcaagagaaaaccagacaacacagaagggacagaagaacagcagagaaagaatgaagagaatcgaagaaggaatcaaggaactgggaagccagatcctgaaggaacacccggtcgaaaacacacagctgcagaacgaaaagctgtacctgtactacctgcagaacggaagagacatgtacgtcgaccaggaactggacatcaacagactgagcgactacgacgtcgaccacatcgtcccgcagagcttcctgaaggacgacagcatcgacaacaaggtcctgacaagaagcgacaagaacagaggaaagagcgacaacgtcccgagcgaagaagtcgtcaagaagatgaagaactactggagacagctgctgaacgcaaagctgatcacacagagaaagttcgacaacctgacaaaggcagagagaggaggactgagcgaactggacaaggcaggattcatcaagagacagctggtcgaaacaagacagatcacaaagcacgtcgcacagatcctggacagcagaatgaacacaaagtacgacgaaaacgacaagctgatcagagaagtcaaggtcatcacactgaagagcaagctggtcagcgacttcagaaaggacttccagttctacaaggtcagagaaatcaacaactaccaccacgcacacgacgcatacctgaacgcagtcgtcggaacagcactgatcaagaagtacccgaagctggaaagcgaattcgtctacggagactacaaggtctacgacgtcagaaagatgatcgcaaagagcgaacaggaaatcggaaaggcaacagcaaagtacttcttctacagcaacatcatgaacttcttcaagacagaaatcacactggcaaacggagaaatcagaaagagaccgctgatcgaaacaaacggagaaacaggagaaatcgtctgggacaagggaagagacttcgcaacagtcagaaaggtcctgagcatgccgcaggtcaacatcgtcaagaagacagaagtccagacaggaggattcagcaaggaaagcatcctgccgaagagaaacagcgacaagctgatcgcaagaaagaaggactgggacccgaagaagtacggaggattcgacagcccgacagtcgcatacagcgtcctggtcgtcgcaaaggtcgaaaagggaaagagcaagaagctgaagagcgtcaaggaactgctgggaatcacaatcatggaaagaagcagcttcgaaaagaacccgatcgacttcctggaagcaaagggatacaaggaagtcaagaaggacctgatcatcaagctgccgaagtacagcctgttcgaactggaaaacggaagaaagagaatgctggcaagcgcaggagaactgcagaagggaaacgaactggcactgccgagcaagtacgtcaacttcctgtacctggcaagccactacgaaaagctgaagggaagcccggaagacaacgaacagaagcagctgttcgtcgaacagcacaagcactacctggacgaaatcatcgaacagatcagcgaattcagcaagagagtcatcctggcagacgcaaacctggacaaggtcctgagcgcatacaacaagcacagagacaagccgatcagagaacaggcagaaaacatcatccacctgttcacactgacaaacctgggagcaccggcagcattcaagtacttcgacacaacaatcgacagaaagagatacacaagcacaaaggaagtcctggacgcaacactgatccaccagagcatcacaggactgtacgaaacaagaatcgacctgagccagctgggaggagacggaggaggaagcagagcagcaaagagaaaggcattcgcagca

SEQ ID NO: 375 - DNA, 4143 bp, Artificial Sequence
  Synthetic: Open reading frame for Cas9 with NLS11 (no start or stop codons; suitable for inclusion in fusion protein coding sequence)
gacaagaagtacagcatcggactggacatcggaacaaacagcgtcggatgggcagtcatcacagacgaatacaaggtcccgagcaagaagttcaaggtcctgggaaacacagacagacacagcatcaagaagaacctgatcggagcactgctgttcgacagcggagaaacagcagaagcaacaagactgaagagaacagcaagaagaagatacacaagaagaaagaacagaatctgctacctgcaggaaatcttcagcaacgaaatggcaaaggtcgacgacagcttcttccacagactggaagaaagcttcctggtcgaagaagacaagaagcacgaaagacacccgatcttcggaaacatcgtcgacgaagtcgcataccacgaaaagtacccgacaatctaccacctgagaaagaagctggtcgacagcacagacaaggcagacctgagactgatctacctggcactggcacacatgatcaagttcagaggacacttcctgatcgaaggagacctgaacccggacaacagcgacgtcgacaagctgttcatccagctggtccagacatacaaccagctgttcgaagaaaacccgatcaacgcaagcggagtcgacgcaaaggcaatcctgagcgcaagactgagcaagagcagaagactggaaaacctgatcgcacagctgccgggagaaaagaagaacggactgttcggaaacctgatcgcactgagcctgggactgacaccgaacttcaagagcaacttcgacctggcagaagacgcaaagctgcagctgagcaaggacacatacgacgacgacctggacaacctgctggcacagatcggagaccagtacgcagacctgttcctggcagcaaagaacctgagcgacgcaatcctgctgagcgacatcctgagagtcaacacagaaatcacaaaggcaccgctgagcgcaagcatgatcaagagatacgacgaacaccaccaggacctgacactgctgaaggcactggtcagacagcagctgccggaaaagtacaaggaaatcttcttcgaccagagcaagaacggatacgcaggatacatcgacggaggagcaagccaggaagaattctacaagttcatcaagccgatcctggaaaagatggacggaacagaagaactgctggtcaagctgaacagagaagacctgctgagaaagcagagaacattcgacaacggaagcatcccgcaccagatccacctgggagaactgcacgcaatcctgagaagacaggaagacttctacccgttcctgaaggacaacagagaaaagatcgaaaagatcctgacattcagaatcccgtactacgtcggaccgctggcaagaggaaacagcagattcgcatggatgacaagaaagagcgaagaaacaatcacaccgtggaacttcgaagaagtcgtcgacaagggagcaagcgcacagagcttcatcgaaagaatgacaaacttcgacaagaacctgccgaacgaaaaggtcctgccgaagcacagcctgctgtacgaatacttcacagtctacaacgaactgacaaaggtcaagtacgtcacagaaggaatgagaaagccggcattcctgagcggagaacagaagaaggcaatcgtcgacctgctgttcaagacaaacagaaaggtcacagtcaagcagctgaaggaagactacttcaagaagatcgaatgcttcgacagcgtcgaaatcagcggagtcgaagacagattcaacgcaagcctgggaacataccacgacctgctgaagatcatcaaggacaaggacttcctggacaacgaagaaaacgaagacatcctggaagacatcgtcctgacactgacactgttcgaagacagagaaatgatcgaagaaagactgaagacatacgcacacctgttcgacgacaaggtcatgaagcagctgaagagaagaagatacacaggatggggaagactgagcagaaagctgatcaacggaatcagagacaagcagagcggaaagacaatcctggacttcctgaagagcgacggattcgcaaacagaaacttcatgcagctgatccacgacgacagcctgacattcaaggaagacatccagaaggcacaggtcagcggacagggagacagcctgcacgaacacatcgcaaacctggcaggaagcccggcaatcaagaagggaatcctgcagacagtcaaggtcgtcgacgaactggtcaaggtcatgggaagacacaagccggaaaacatcgtcatcgaaatggcaagagaaaaccagacaacacagaagggacagaagaacagcagagaaagaatgaagagaatcgaagaaggaatcaaggaactgggaagccagatcctgaaggaacacccggtcgaaaacacacagctgcagaacgaaaagctgtacctgtactacctgcagaacggaagagacatgtacgtcgaccaggaactggacatcaacagactgagcgactacgacgtcgaccacatcgtcccgcagagcttcctgaaggacgacagcatcgacaacaaggtcctgacaagaagcgacaagaacagaggaaagagcgacaacgtcccgagcgaagaagtcgtcaagaagatgaagaactactggagacagctgctgaacgcaaagctgatcacacagagaaagttcgacaacctgacaaaggcagagagaggaggactgagcgaactggacaaggcaggattcatcaagagacagctggtcgaaacaagacagatcacaaagcacgtcgcacagatcctggacagcagaatgaacacaaagtacgacgaaaacgacaagctgatcagagaagtcaaggtcatcacactgaagagcaagctggtcagcgacttcagaaaggacttccagttctacaaggtcagagaaatcaacaactaccaccacgcacacgacgcatacctgaacgcagtcgtcggaacagcactgatcaagaagtacccgaagctggaaagcgaattcgtctacggagactacaaggtctacgacgtcagaaagatgatcgcaaagagcgaacaggaaatcggaaaggcaacagcaaagtacttcttctacagcaacatcatgaacttcttcaagacagaaatcacactggcaaacggagaaatcagaaagagaccgctgatcgaaacaaacggagaaacaggagaaatcgtctgggacaagggaagagacttcgcaacagtcagaaaggtcctgagcatgccgcaggtcaacatcgtcaagaagacagaagtccagacaggaggattcagcaaggaaagcatcctgccgaagagaaacagcgacaagctgatcgcaagaaagaaggactgggacccgaagaagtacggaggattcgacagcccgacagtcgcatacagcgtcctggtcgtcgcaaaggtcgaaaagggaaagagcaagaagctgaagagcgtcaaggaactgctgggaatcacaatcatggaaagaagcagcttcgaaaagaacccgatcgacttcctggaagcaaagggatacaaggaagtcaagaaggacctgatcatcaagctgccgaagtacagcctgttcgaactggaaaacggaagaaagagaatgctggcaagcgcaggagaactgcagaagggaaacgaactggcactgccgagcaagtacgtcaacttcctgtacctggcaagccactacgaaaagctgaagggaagcccggaagacaacgaacagaagcagctgttcgtcgaacagcacaagcactacctggacgaaatcatcgaacagatcagcgaattcagcaagagagtcatcctggcagacgcaaacctggacaaggtcctgagcgcatacaacaagcacagagacaagccgatcagagaacaggcagaaaacatcatccacctgttcacactgacaaacctgggagcaccggcagcattcaagtacttcgacacaacaatcgacagaaagagatacacaagcacaaaggaagtcctggacgcaacactgatccaccagagcatcacaggactgtacgaaacaagaatcgacctgagccagctgggaggagacggaggaggaagcagagcagcaaagagaaagtacttcgcagtc

SEQ ID NO: 376 - RNA, 4405 nt, Artificial Sequence
  Synthetic: mRNA transcript with XBG UTRs and Cas9 ORF with low U 1 codons of Table 4
gggaagcucagaauaaacgcucaacuuuggccggaucugccaccauggacaagaaguacagcaucggccuggacaucggcaccaacagcgugggcugggccgugaucaccgacgaguacaaggugcccagcaagaaguucaaggugcugggcaacaccgacagacacagcaucaagaagaaccugaucggcgcccugcuguucgacagcggcgagaccgccgaggccaccagacugaagagaaccgccagaagaagauacaccagaagaaagaacagaaucugcuaccugcaggagaucuucagcaacgagauggccaagguggacgacagcuucuuccacagacuggaggagagcuuccugguggaggaggacaagaagcacgagagacaccccaucuucggcaacaucguggacgagguggccuaccacgagaaguaccccaccaucuaccaccugagaaagaagcugguggacagcaccgacaaggccgaccugagacugaucuaccuggcccuggcccacaugaucaaguucagaggccacuuccugaucgagggcgaccugaaccccgacaacagcgacguggacaagcuguucauccagcuggugcagaccuacaaccagcuguucgaggagaaccccaucaacgccagcggcguggacgccaaggccauccugagcgccagacugagcaagagcagaagacuggagaaccugaucgcccagcugcccggcgagaagaagaacggccuguucggcaaccugaucgcccugagccugggccugacccccaacuucaagagcaacuucgaccuggccgaggacgccaagcugcagcugagcaaggacaccuacgacgacgaccuggacaaccugcuggcccagaucggcgaccaguacgccgaccuguuccuggccgccaagaaccugagcgacgccauccugcugagcgacauccugagagugaacaccgagaucaccaaggccccccugagcgccagcaugaucaagagauacgacgagcaccaccaggaccugacccugcugaaggcccuggugagacagcagcugcccgagaaguacaaggagaucuucuucgaccagagcaagaacggcuacgccggcuacaucgacggcggcgccagccaggaggaguucuacaaguucaucaagcccauccuggagaagauggacggcaccgaggagcugcuggugaagcugaacagagaggaccugcugagaaagcagagaaccuucgacaacggcagcaucccccaccagauccaccugggcgagcugcacgccauccugagaagacaggaggacuucuaccccuuccugaaggacaacagagagaagaucgagaagauccugaccuucagaauccccuacuacgugggcccccuggccagaggcaacagcagauucgccuggaugaccagaaagagcgaggagaccaucacccccuggaacuucgaggaggugguggacaagggcgccagcgcccagagcuucaucgagagaaugaccaacuucgacaagaaccugcccaacgagaaggugcugcccaagcacagccugcuguacgaguacuucaccguguacaacgagcugaccaaggugaaguacgugaccgagggcaugagaaagcccgccuuccugagcggcgagcagaagaaggccaucguggaccugcuguucaagaccaacagaaaggugaccgugaagcagcugaaggaggacuacuucaagaagaucgagugcuucgacagcguggagaucagcggcguggaggacagauucaacgccagccugggcaccuaccacgaccugcugaagaucaucaaggacaaggacuuccuggacaacgaggagaacgaggacauccuggaggacaucgugcugacccugacccuguucgaggacagagagaugaucgaggagagacugaagaccuacgcccaccuguucgacgacaaggugaugaagcagcugaagagaagaagauacaccggcuggggcagacugagcagaaagcugaucaacggcaucagagacaagcagagcggcaagaccauccuggacuuccugaagagcgacggcuucgccaacagaaacuucaugcagcugauccacgacgacagccugaccuucaaggaggacauccagaaggcccaggugagcggccagggcgacagccugcacgagcacaucgccaaccuggccggcagccccgccaucaagaagggcauccugcagaccgugaaggugguggacgagcuggugaaggugaugggcagacacaagcccgagaacaucgugaucgagauggccagagagaaccagaccacccagaagggccagaagaacagcagagagagaaugaagagaaucgaggagggcaucaaggagcugggcagccagauccugaaggagcaccccguggagaacacccagcugcagaacgagaagcuguaccuguacuaccugcagaacggcagagacauguacguggaccaggagcuggacaucaacagacugagcgacuacgacguggaccacaucgugccccagagcuuccugaaggacgacagcaucgacaacaaggugcugaccagaagcgacaagaacagaggcaagagcgacaacgugcccagcgaggagguggugaagaagaugaagaacuacuggagacagcugcugaacgccaagcugaucacccagagaaaguucgacaaccugaccaaggccgagagaggcggccugagcgagcuggacaaggccggcuucaucaagagacagcugguggagaccagacagaucaccaagcacguggcccagauccuggacagcagaaugaacaccaaguacgacgagaacgacaagcugaucagagaggugaaggugaucacccugaagagcaagcuggugagcgacuucagaaaggacuuccaguucuacaaggugagagagaucaacaacuaccaccacgcccacgacgccuaccugaacgccguggugggcaccgcccugaucaagaaguaccccaagcuggagagcgaguucguguacggcgacuacaagguguacgacgugagaaagaugaucgccaagagcgagcaggagaucggcaaggccaccgccaaguacuucuucuacagcaacaucaugaacuucuucaagaccgagaucacccuggccaacggcgagaucagaaagagaccccugaucgagaccaacggcgagaccggcgagaucgugugggacaagggcagagacuucgccaccgugagaaaggugcugagcaugccccaggugaacaucgugaagaagaccgaggugcagaccggcggcuucagcaaggagagcauccugcccaagagaaacagcgacaagcugaucgccagaaagaaggacugggaccccaagaaguacggcggcuucgacagccccaccguggccuacagcgugcuggugguggccaagguggagaagggcaagagcaagaagcugaagagcgugaaggagcugcugggcaucaccaucauggagagaagcagcuucgagaagaaccccaucgacuuccuggaggccaagggcuacaaggaggugaagaaggaccugaucaucaagcugcccaaguacagccuguucgagcuggagaacggcagaaagagaaugcuggccagcgccggcgagcugcagaagggcaacgagcuggcccugcccagcaaguacgugaacuuccuguaccuggccagccacuacgagaagcugaagggcagccccgaggacaacgagcagaagcagcuguucguggagcagcacaagcacuaccuggacgagaucaucgagcagaucagcgaguucagcaagagagugauccuggccgacgccaaccuggacaaggugcugagcgccuacaacaagcacagagacaagcccaucagagagcaggccgagaacaucauccaccuguucacccugaccaaccugggcgcccccgccgccuucaaguacuucgacaccaccaucgacagaaagagauacaccagcaccaaggaggugcuggacgccacccugauccaccagagcaucaccggccuguacgagaccagaaucgaccugagccagcugggcggcgacggcggcggcagccccaagaagaagagaaaggugugacuagcaccagccucaagaacacccgaauggagucucuaagcuacauaauaccaacuuacacuuuacaaaauguugucccccaaaauguagccauucguaucugcuccuaauaaaaagaaaguuucuucacauucucucgagaaaaaaaaaaaaaaaaaaaaaaaaaaaaaaaaaaaaaaaaaaaaaaaaaaaaaaaaaaaaaaaaaaaaaaaaaaaaaaaa

SEQ ID NO: 377 - RNA, 4405 nt, Artificial Sequence
  Synthetic: mRNA transcript with XBG UTRs and Cas9 ORF with low A codons of Table 4
gggaagcucagaauaaacgcucaacuuuggccggaucugccaccauggacaagaaguacuccaucggccuggacaucggcaccaacuccgugggcugggccgugaucaccgacgaguacaaggugcccuccaagaaguucaaggugcugggcaacaccgaccggcacuccaucaagaagaaccugaucggcgcccugcuguucgacuccggcgagaccgccgaggccacccggcugaagcggaccgcccggcggcgguacacccggcggaagaaccggaucugcuaccugcaggagaucuucuccaacgagauggccaagguggacgacuccuucuuccaccggcuggaggaguccuuccugguggaggaggacaagaagcacgagcggcaccccaucuucggcaacaucguggacgagguggccuaccacgagaaguaccccaccaucuaccaccugcggaagaagcugguggacuccaccgacaaggccgaccugcggcugaucuaccuggcccuggcccacaugaucaaguuccggggccacuuccugaucgagggcgaccugaaccccgacaacuccgacguggacaagcuguucauccagcuggugcagaccuacaaccagcuguucgaggagaaccccaucaacgccuccggcguggacgccaaggccauccuguccgcccggcuguccaagucccggcggcuggagaaccugaucgcccagcugcccggcgagaagaagaacggccuguucggcaaccugaucgcccugucccugggccugacccccaacuucaaguccaacuucgaccuggccgaggacgccaagcugcagcuguccaaggacaccuacgacgacgaccuggacaaccugcuggcccagaucggcgaccaguacgccgaccuguuccuggccgccaagaaccuguccgacgccauccugcuguccgacauccugcgggugaacaccgagaucaccaaggccccccuguccgccuccaugaucaagcgguacgacgagcaccaccaggaccugacccugcugaaggcccuggugcggcagcagcugcccgagaaguacaaggagaucuucuucgaccaguccaagaacggcuacgccggcuacaucgacggcggcgccucccaggaggaguucuacaaguucaucaagcccauccuggagaagauggacggcaccgaggagcugcuggugaagcugaaccgggaggaccugcugcggaagcagcggaccuucgacaacggcuccaucccccaccagauccaccugggcgagcugcacgccauccugcggcggcaggaggacuucuaccccuuccugaaggacaaccgggagaagaucgagaagauccugaccuuccggauccccuacuacgugggcccccuggcccggggcaacucccgguucgccuggaugacccggaaguccgaggagaccaucacccccuggaacuucgaggaggugguggacaagggcgccuccgcccaguccuucaucgagcggaugaccaacuucgacaagaaccugcccaacgagaaggugcugcccaagcacucccugcuguacgaguacuucaccguguacaacgagcugaccaaggugaaguacgugaccgagggcaugcggaagcccgccuuccuguccggcgagcagaagaaggccaucguggaccugcuguucaagaccaaccggaaggugaccgugaagcagcugaaggaggacuacuucaagaagaucgagugcuucgacuccguggagaucuccggcguggaggaccgguucaacgccucccugggcaccuaccacgaccugcugaagaucaucaaggacaaggacuuccuggacaacgaggagaacgaggacauccuggaggacaucgugcugacccugacccuguucgaggaccgggagaugaucgaggagcggcugaagaccuacgcccaccuguucgacgacaaggugaugaagcagcugaagcggcggcgguacaccggcuggggccggcugucccggaagcugaucaacggcauccgggacaagcaguccggcaagaccauccuggacuuccugaaguccgacggcuucgccaaccggaacuucaugcagcugauccacgacgacucccugaccuucaaggaggacauccagaaggcccagguguccggccagggcgacucccugcacgagcacaucgccaaccuggccggcucccccgccaucaagaagggcauccugcagaccgugaaggugguggacgagcuggugaaggugaugggccggcacaagcccgagaacaucgugaucgagauggcccgggagaaccagaccacccagaagggccagaagaacucccgggagcggaugaagcggaucgaggagggcaucaaggagcugggcucccagauccugaaggagcaccccguggagaacacccagcugcagaacgagaagcuguaccuguacuaccugcagaacggccgggacauguacguggaccaggagcuggacaucaaccggcuguccgacuacgacguggaccacaucgugccccaguccuuccugaaggacgacuccaucgacaacaaggugcugacccgguccgacaagaaccggggcaaguccgacaacgugcccuccgaggagguggugaagaagaugaagaacuacuggcggcagcugcugaacgccaagcugaucacccagcggaaguucgacaaccugaccaaggccgagcggggcggccuguccgagcuggacaaggccggcuucaucaagcggcagcugguggagacccggcagaucaccaagcacguggcccagauccuggacucccggaugaacaccaaguacgacgagaacgacaagcugauccgggaggugaaggugaucacccugaaguccaagcugguguccgacuuccggaaggacuuccaguucuacaaggugcgggagaucaacaacuaccaccacgcccacgacgccuaccugaacgccguggugggcaccgcccugaucaagaaguaccccaagcuggaguccgaguucguguacggcgacuacaagguguacgacgugcggaagaugaucgccaaguccgagcaggagaucggcaaggccaccgccaaguacuucuucuacuccaacaucaugaacuucuucaagaccgagaucacccuggccaacggcgagauccggaagcggccccugaucgagaccaacggcgagaccggcgagaucgugugggacaagggccgggacuucgccaccgugcggaaggugcuguccaugccccaggugaacaucgugaagaagaccgaggugcagaccggcggcuucuccaaggaguccauccugcccaagcggaacuccgacaagcugaucgcccggaagaaggacugggaccccaagaaguacggcggcuucgacucccccaccguggccuacuccgugcuggugguggccaagguggagaagggcaaguccaagaagcugaaguccgugaaggagcugcugggcaucaccaucauggagcgguccuccuucgagaagaaccccaucgacuuccuggaggccaagggcuacaaggaggugaagaaggaccugaucaucaagcugcccaaguacucccuguucgagcuggagaacggccggaagcggaugcuggccuccgccggcgagcugcagaagggcaacgagcuggcccugcccuccaaguacgugaacuuccuguaccuggccucccacuacgagaagcugaagggcucccccgaggacaacgagcagaagcagcuguucguggagcagcacaagcacuaccuggacgagaucaucgagcagaucuccgaguucuccaagcgggugauccuggccgacgccaaccuggacaaggugcuguccgccuacaacaagcaccgggacaagcccauccgggagcaggccgagaacaucauccaccuguucacccugaccaaccugggcgcccccgccgccuucaaguacuucgacaccaccaucgaccggaagcgguacaccuccaccaaggaggugcuggacgccacccugauccaccaguccaucaccggccuguacgagacccggaucgaccugucccagcugggcggcgacggcggcggcucccccaagaagaagcggaaggugugacuagcaccagccucaagaacacccgaauggagucucuaagcuacauaauaccaacuuacacuuuacaaaauguugucccccaaaauguagccauucguaucugcuccuaauaaaaagaaaguuucuucacauucucucgagaaaaaaaaaaaaaaaaaaaaaaaaaaaaaaaaaaaaaaaaaaaaaaaaaaaaaaaaaaaaaaaaaaaaaaaaaaaaaaaa

SEQ ID NO: 378 - RNA, 4405 nt, Artificial Sequence
  Synthetic: mRNA transcript with XBG UTRs and Cas9 ORF with low U/A codons of Table 4
gggaagcucagaauaaacgcucaacuuuggccggaucugccaccauggacaagaaguacagcaucggccuggacaucggcaccaacagcgugggcugggccgugaucaccgacgaguacaaggugcccagcaagaaguucaaggugcugggcaacaccgaccggcacagcaucaagaagaaccugaucggcgcccugcuguucgacagcggcgagaccgccgaggccacccggcugaagcggaccgcccggcggcgguacacccggcggaagaaccggaucugcuaccugcaggagaucuucagcaacgagauggccaagguggacgacagcuucuuccaccggcuggaggagagcuuccugguggaggaggacaagaagcacgagcggcaccccaucuucggcaacaucguggacgagguggccuaccacgagaaguaccccaccaucuaccaccugcggaagaagcugguggacagcaccgacaaggccgaccugcggcugaucuaccuggcccuggcccacaugaucaaguuccggggccacuuccugaucgagggcgaccugaaccccgacaacagcgacguggacaagcuguucauccagcuggugcagaccuacaaccagcuguucgaggagaaccccaucaacgccagcggcguggacgccaaggccauccugagcgcccggcugagcaagagccggcggcuggagaaccugaucgcccagcugcccggcgagaagaagaacggccuguucggcaaccugaucgcccugagccugggccugacccccaacuucaagagcaacuucgaccuggccgaggacgccaagcugcagcugagcaaggacaccuacgacgacgaccuggacaaccugcuggcccagaucggcgaccaguacgccgaccuguuccuggccgccaagaaccugagcgacgccauccugcugagcgacauccugcgggugaacaccgagaucaccaaggccccccugagcgccagcaugaucaagcgguacgacgagcaccaccaggaccugacccugcugaaggcccuggugcggcagcagcugcccgagaaguacaaggagaucuucuucgaccagagcaagaacggcuacgccggcuacaucgacggcggcgccagccaggaggaguucuacaaguucaucaagcccauccuggagaagauggacggcaccgaggagcugcuggugaagcugaaccgggaggaccugcugcggaagcagcggaccuucgacaacggcagcaucccccaccagauccaccugggcgagcugcacgccauccugcggcggcaggaggacuucuaccccuuccugaaggacaaccgggagaagaucgagaagauccugaccuuccggauccccuacuacgugggcccccuggcccggggcaacagccgguucgccuggaugacccggaagagcgaggagaccaucacccccuggaacuucgaggaggugguggacaagggcgccagcgcccagagcuucaucgagcggaugaccaacuucgacaagaaccugcccaacgagaaggugcugcccaagcacagccugcuguacgaguacuucaccguguacaacgagcugaccaaggugaaguacgugaccgagggcaugcggaagcccgccuuccugagcggcgagcagaagaaggccaucguggaccugcuguucaagaccaaccggaaggugaccgugaagcagcugaaggaggacuacuucaagaagaucgagugcuucgacagcguggagaucagcggcguggaggaccgguucaacgccagccugggcaccuaccacgaccugcugaagaucaucaaggacaaggacuuccuggacaacgaggagaacgaggacauccuggaggacaucgugcugacccugacccuguucgaggaccgggagaugaucgaggagcggcugaagaccuacgcccaccuguucgacgacaaggugaugaagcagcugaagcggcggcgguacaccggcuggggccggcugagccggaagcugaucaacggcauccgggacaagcagagcggcaagaccauccuggacuuccugaagagcgacggcuucgccaaccggaacuucaugcagcugauccacgacgacagccugaccuucaaggaggacauccagaaggcccaggugagcggccagggcgacagccugcacgagcacaucgccaaccuggccggcagccccgccaucaagaagggcauccugcagaccgugaaggugguggacgagcuggugaaggugaugggccggcacaagcccgagaacaucgugaucgagauggcccgggagaaccagaccacccagaagggccagaagaacagccgggagcggaugaagcggaucgaggagggcaucaaggagcugggcagccagauccugaaggagcaccccguggagaacacccagcugcagaacgagaagcuguaccuguacuaccugcagaacggccgggacauguacguggaccaggagcuggacaucaaccggcugagcgacuacgacguggaccacaucgugccccagagcuuccugaaggacgacagcaucgacaacaaggugcugacccggagcgacaagaaccggggcaagagcgacaacgugcccagcgaggagguggugaagaagaugaagaacuacuggcggcagcugcugaacgccaagcugaucacccagcggaaguucgacaaccugaccaaggccgagcggggcggccugagcgagcuggacaaggccggcuucaucaagcggcagcugguggagacccggcagaucaccaagcacguggcccagauccuggacagccggaugaacaccaaguacgacgagaacgacaagcugauccgggaggugaaggugaucacccugaagagcaagcuggugagcgacuuccggaaggacuuccaguucuacaaggugcgggagaucaacaacuaccaccacgcccacgacgccuaccugaacgccguggugggcaccgcccugaucaagaaguaccccaagcuggagagcgaguucguguacggcgacuacaagguguacgacgugcggaagaugaucgccaagagcgagcaggagaucggcaaggccaccgccaaguacuucuucuacagcaacaucaugaacuucuucaagaccgagaucacccuggccaacggcgagauccggaagcggccccugaucgagaccaacggcgagaccggcgagaucgugugggacaagggccgggacuucgccaccgugcggaaggugcugagcaugccccaggugaacaucgugaagaagaccgaggugcagaccggcggcuucagcaaggagagcauccugcccaagcggaacagcgacaagcugaucgcccggaagaaggacugggaccccaagaaguacggcggcuucgacagccccaccguggccuacagcgugcuggugguggccaagguggagaagggcaagagcaagaagcugaagagcgugaaggagcugcugggcaucaccaucauggagcggagcagcuucgagaagaaccccaucgacuuccuggaggccaagggcuacaaggaggugaagaaggaccugaucaucaagcugcccaaguacagccuguucgagcuggagaacggccggaagcggaugcuggccagcgccggcgagcugcagaagggcaacgagcuggcccugcccagcaaguacgugaacuuccuguaccuggccagccacuacgagaagcugaagggcagccccgaggacaacgagcagaagcagcuguucguggagcagcacaagcacuaccuggacgagaucaucgagcagaucagcgaguucagcaagcgggugauccuggccgacgccaaccuggacaaggugcugagcgccuacaacaagcaccgggacaagcccauccgggagcaggccgagaacaucauccaccuguucacccugaccaaccugggcgcccccgccgccuucaaguacuucgacaccaccaucgaccggaagcgguacaccagcaccaaggaggugcuggacgccacccugauccaccagagcaucaccggccuguacgagacccggaucgaccugagccagcugggcggcgacggcggcggcagccccaagaagaagcggaaggugugacuagcaccagccucaagaacacccgaauggagucucuaagcuacauaauaccaacuuacacuuuacaaaauguugucccccaaaauguagccauucguaucugcuccuaauaaaaagaaaguuucuucacauucucucgagaaaaaaaaaaaaaaaaaaaaaaaaaaaaaaaaaaaaaaaaaaaaaaaaaaaaaaaaaaaaaaaaaaaaaaaaaaaaaaaa

SEQ ID NO: 379 - DNA, 4548 bp, Artificial Sequence
  Synthetic: mRNA transcript with ORF encoding Cas9 with HiBiT tag, HSD 5 UTR and human ALB 3 UTR
gggtcccgcagtcggcgtccagcggctctgcttgttcgtgtgtgtgtcgttgcaggccttattcggatccgccaccatggacaagaagtacagcatcggactggacatcggaacaaacagcgtcggatgggcagtcatcacagacgaatacaaggtcccgagcaagaagttcaaggtcctgggaaacacagacagacacagcatcaagaagaacctgatcggagcactgctgttcgacagcggagaaacagcagaagcaacaagactgaagagaacagcaagaagaagatacacaagaagaaagaacagaatctgctacctgcaggaaatcttcagcaacgaaatggcaaaggtcgacgacagcttcttccacagactggaagaaagcttcctggtcgaagaagacaagaagcacgaaagacacccgatcttcggaaacatcgtcgacgaagtcgcataccacgaaaagtacccgacaatctaccacctgagaaagaagctggtcgacagcacagacaaggcagacctgagactgatctacctggcactggcacacatgatcaagttcagaggacacttcctgatcgaaggagacctgaacccggacaacagcgacgtcgacaagctgttcatccagctggtccagacatacaaccagctgttcgaagaaaacccgatcaacgcaagcggagtcgacgcaaaggcaatcctgagcgcaagactgagcaagagcagaagactggaaaacctgatcgcacagctgccgggagaaaagaagaacggactgttcggaaacctgatcgcactgagcctgggactgacaccgaacttcaagagcaacttcgacctggcagaagacgcaaagctgcagctgagcaaggacacatacgacgacgacctggacaacctgctggcacagatcggagaccagtacgcagacctgttcctggcagcaaagaacctgagcgacgcaatcctgctgagcgacatcctgagagtcaacacagaaatcacaaaggcaccgctgagcgcaagcatgatcaagagatacgacgaacaccaccaggacctgacactgctgaaggcactggtcagacagcagctgccggaaaagtacaaggaaatcttcttcgaccagagcaagaacggatacgcaggatacatcgacggaggagcaagccaggaagaattctacaagttcatcaagccgatcctggaaaagatggacggaacagaagaactgctggtcaagctgaacagagaagacctgctgagaaagcagagaacattcgacaacggaagcatcccgcaccagatccacctgggagaactgcacgcaatcctgagaagacaggaagacttctacccgttcctgaaggacaacagagaaaagatcgaaaagatcctgacattcagaatcccgtactacgtcggaccgctggcaagaggaaacagcagattcgcatggatgacaagaaagagcgaagaaacaatcacaccgtggaacttcgaagaagtcgtcgacaagggagcaagcgcacagagcttcatcgaaagaatgacaaacttcgacaagaacctgccgaacgaaaaggtcctgccgaagcacagcctgctgtacgaatacttcacagtctacaacgaactgacaaaggtcaagtacgtcacagaaggaatgagaaagccggcattcctgagcggagaacagaagaaggcaatcgtcgacctgctgttcaagacaaacagaaaggtcacagtcaagcagctgaaggaagactacttcaagaagatcgaatgcttcgacagcgtcgaaatcagcggagtcgaagacagattcaacgcaagcctgggaacataccacgacctgctgaagatcatcaaggacaaggacttcctggacaacgaagaaaacgaagacatcctggaagacatcgtcctgacactgacactgttcgaagacagagaaatgatcgaagaaagactgaagacatacgcacacctgttcgacgacaaggtcatgaagcagctgaagagaagaagatacacaggatggggaagactgagcagaaagctgatcaacggaatcagagacaagcagagcggaaagacaatcctggacttcctgaagagcgacggattcgcaaacagaaacttcatgcagctgatccacgacgacagcctgacattcaaggaagacatccagaaggcacaggtcagcggacagggagacagcctgcacgaacacatcgcaaacctggcaggaagcccggcaatcaagaagggaatcctgcagacagtcaaggtcgtcgacgaactggtcaaggtcatgggaagacacaagccggaaaacatcgtcatcgaaatggcaagagaaaaccagacaacacagaagggacagaagaacagcagagaaagaatgaagagaatcgaagaaggaatcaaggaactgggaagccagatcctgaaggaacacccggtcgaaaacacacagctgcagaacgaaaagctgtacctgtactacctgcagaacggaagagacatgtacgtcgaccaggaactggacatcaacagactgagcgactacgacgtcgaccacatcgtcccgcagagcttcctgaaggacgacagcatcgacaacaaggtcctgacaagaagcgacaagaacagaggaaagagcgacaacgtcccgagcgaagaagtcgtcaagaagatgaagaactactggagacagctgctgaacgcaaagctgatcacacagagaaagttcgacaacctgacaaaggcagagagaggaggactgagcgaactggacaaggcaggattcatcaagagacagctggtcgaaacaagacagatcacaaagcacgtcgcacagatcctggacagcagaatgaacacaaagtacgacgaaaacgacaagctgatcagagaagtcaaggtcatcacactgaagagcaagctggtcagcgacttcagaaaggacttccagttctacaaggtcagagaaatcaacaactaccaccacgcacacgacgcatacctgaacgcagtcgtcggaacagcactgatcaagaagtacccgaagctggaaagcgaattcgtctacggagactacaaggtctacgacgtcagaaagatgatcgcaaagagcgaacaggaaatcggaaaggcaacagcaaagtacttcttctacagcaacatcatgaacttcttcaagacagaaatcacactggcaaacggagaaatcagaaagagaccgctgatcgaaacaaacggagaaacaggagaaatcgtctgggacaagggaagagacttcgcaacagtcagaaaggtcctgagcatgccgcaggtcaacatcgtcaagaagacagaagtccagacaggaggattcagcaaggaaagcatcctgccgaagagaaacagcgacaagctgatcgcaagaaagaaggactgggacccgaagaagtacggaggattcgacagcccgacagtcgcatacagcgtcctggtcgtcgcaaaggtcgaaaagggaaagagcaagaagctgaagagcgtcaaggaactgctgggaatcacaatcatggaaagaagcagcttcgaaaagaacccgatcgacttcctggaagcaaagggatacaaggaagtcaagaaggacctgatcatcaagctgccgaagtacagcctgttcgaactggaaaacggaagaaagagaatgctggcaagcgcaggagaactgcagaagggaaacgaactggcactgccgagcaagtacgtcaacttcctgtacctggcaagccactacgaaaagctgaagggaagcccggaagacaacgaacagaagcagctgttcgtcgaacagcacaagcactacctggacgaaatcatcgaacagatcagcgaattcagcaagagagtcatcctggcagacgcaaacctggacaaggtcctgagcgcatacaacaagcacagagacaagccgatcagagaacaggcagaaaacatcatccacctgttcacactgacaaacctgggagcaccggcagcattcaagtacttcgacacaacaatcgacagaaagagatacacaagcacaaaggaagtcctggacgcaacactgatccaccagagcatcacaggactgtacgaaacaagaatcgacctgagccagctgggaggagacggaggaggaagcccgaagaagaagagaaaggtcagcgaaagcgcaacaccggaaagcgtcagcggatggagactgttcaagaagatcagctagctagccatcacatttaaaagcatctcagcctaccatgagaataagagaaagaaaatgaagatcaatagcttattcatctctttttctttttcgttggtgtaaagccaacaccctgtctaaaaaacataaatttctttaatcattttgcctcttttctctgtgcttcaattaataaaaaatggaaagaacctcgagaaaaaaaaaaaaaaaaaaaaaaaaaaaaaaaaaaaaaaaaaaaaaaaaaaaaaaaaaaaaaaaaaaaaaaaaaaaaaaaa

SEQ ID NO: 380 - DNA, 4524 bp, Artificial Sequence
  Synthetic: mRNA transcript with ORF encoding Cas9 with HiBiT tag, CMV-1 5 UTR and human ALB 3 UTR
gggcagatcgcctggagacgccatccacgctgttttgacctccatcgccaccatggacaagaagtacagcatcggactggacatcggaacaaacagcgtcggatgggcagtcatcacagacgaatacaaggtcccgagcaagaagttcaaggtcctgggaaacacagacagacacagcatcaagaagaacctgatcggagcactgctgttcgacagcggagaaacagcagaagcaacaagactgaagagaacagcaagaagaagatacacaagaagaaagaacagaatctgctacctgcaggaaatcttcagcaacgaaatggcaaaggtcgacgacagcttcttccacagactggaagaaagcttcctggtcgaagaagacaagaagcacgaaagacacccgatcttcggaaacatcgtcgacgaagtcgcataccacgaaaagtacccgacaatctaccacctgagaaagaagctggtcgacagcacagacaaggcagacctgagactgatctacctggcactggcacacatgatcaagttcagaggacacttcctgatcgaaggagacctgaacccggacaacagcgacgtcgacaagctgttcatccagctggtccagacatacaaccagctgttcgaagaaaacccgatcaacgcaagcggagtcgacgcaaaggcaatcctgagcgcaagactgagcaagagcagaagactggaaaacctgatcgcacagctgccgggagaaaagaagaacggactgttcggaaacctgatcgcactgagcctgggactgacaccgaacttcaagagcaacttcgacctggcagaagacgcaaagctgcagctgagcaaggacacatacgacgacgacctggacaacctgctggcacagatcggagaccagtacgcagacctgttcctggcagcaaagaacctgagcgacgcaatcctgctgagcgacatcctgagagtcaacacagaaatcacaaaggcaccgctgagcgcaagcatgatcaagagatacgacgaacaccaccaggacctgacactgctgaaggcactggtcagacagcagctgccggaaaagtacaaggaaatcttcttcgaccagagcaagaacggatacgcaggatacatcgacggaggagcaagccaggaagaattctacaagttcatcaagccgatcctggaaaagatggacggaacagaagaactgctggtcaagctgaacagagaagacctgctgagaaagcagagaacattcgacaacggaagcatcccgcaccagatccacctgggagaactgcacgcaatcctgagaagacaggaagacttctacccgttcctgaaggacaacagagaaaagatcgaaaagatcctgacattcagaatcccgtactacgtcggaccgctggcaagaggaaacagcagattcgcatggatgacaagaaagagcgaagaaacaatcacaccgtggaacttcgaagaagtcgtcgacaagggagcaagcgcacagagcttcatcgaaagaatgacaaacttcgacaagaacctgccgaacgaaaaggtcctgccgaagcacagcctgctgtacgaatacttcacagtctacaacgaactgacaaaggtcaagtacgtcacagaaggaatgagaaagccggcattcctgagcggagaacagaagaaggcaatcgtcgacctgctgttcaagacaaacagaaaggtcacagtcaagcagctgaaggaagactacttcaagaagatcgaatgcttcgacagcgtcgaaatcagcggagtcgaagacagattcaacgcaagcctgggaacataccacgacctgctgaagatcatcaaggacaaggacttcctggacaacgaagaaaacgaagacatcctggaagacatcgtcctgacactgacactgttcgaagacagagaaatgatcgaagaaagactgaagacatacgcacacctgttcgacgacaaggtcatgaagcagctgaagagaagaagatacacaggatggggaagactgagcagaaagctgatcaacggaatcagagacaagcagagcggaaagacaatcctggacttcctgaagagcgacggattcgcaaacagaaacttcatgcagctgatccacgacgacagcctgacattcaaggaagacatccagaaggcacaggtcagcggacagggagacagcctgcacgaacacatcgcaaacctggcaggaagcccggcaatcaagaagggaatcctgcagacagtcaaggtcgtcgacgaactggtcaaggtcatgggaagacacaagccggaaaacatcgtcatcgaaatggcaagagaaaaccagacaacacagaagggacagaagaacagcagagaaagaatgaagagaatcgaagaaggaatcaaggaactgggaagccagatcctgaaggaacacccggtcgaaaacacacagctgcagaacgaaaagctgtacctgtactacctgcagaacggaagagacatgtacgtcgaccaggaactggacatcaacagactgagcgactacgacgtcgaccacatcgtcccgcagagcttcctgaaggacgacagcatcgacaacaaggtcctgacaagaagcgacaagaacagaggaaagagcgacaacgtcccgagcgaagaagtcgtcaagaagatgaagaactactggagacagctgctgaacgcaaagctgatcacacagagaaagttcgacaacctgacaaaggcagagagaggaggactgagcgaactggacaaggcaggattcatcaagagacagctggtcgaaacaagacagatcacaaagcacgtcgcacagatcctggacagcagaatgaacacaaagtacgacgaaaacgacaagctgatcagagaagtcaaggtcatcacactgaagagcaagctggtcagcgacttcagaaaggacttccagttctacaaggtcagagaaatcaacaactaccaccacgcacacgacgcatacctgaacgcagtcgtcggaacagcactgatcaagaagtacccgaagctggaaagcgaattcgtctacggagactacaaggtctacgacgtcagaaagatgatcgcaaagagcgaacaggaaatcggaaaggcaacagcaaagtacttcttctacagcaacatcatgaacttcttcaagacagaaatcacactggcaaacggagaaatcagaaagagaccgctgatcgaaacaaacggagaaacaggagaaatcgtctgggacaagggaagagacttcgcaacagtcagaaaggtcctgagcatgccgcaggtcaacatcgtcaagaagacagaagtccagacaggaggattcagcaaggaaagcatcctgccgaagagaaacagcgacaagctgatcgcaagaaagaaggactgggacccgaagaagtacggaggattcgacagcccgacagtcgcatacagcgtcctggtcgtcgcaaaggtcgaaaagggaaagagcaagaagctgaagagcgtcaaggaactgctgggaatcacaatcatggaaagaagcagcttcgaaaagaacccgatcgacttcctggaagcaaagggatacaaggaagtcaagaaggacctgatcatcaagctgccgaagtacagcctgttcgaactggaaaacggaagaaagagaatgctggcaagcgcaggagaactgcagaagggaaacgaactggcactgccgagcaagtacgtcaacttcctgtacctggcaagccactacgaaaagctgaagggaagcccggaagacaacgaacagaagcagctgttcgtcgaacagcacaagcactacctggacgaaatcatcgaacagatcagcgaattcagcaagagagtcatcctggcagacgcaaacctggacaaggtcctgagcgcatacaacaagcacagagacaagccgatcagagaacaggcagaaaacatcatccacctgttcacactgacaaacctgggagcaccggcagcattcaagtacttcgacacaacaatcgacagaaagagatacacaagcacaaaggaagtcctggacgcaacactgatccaccagagcatcacaggactgtacgaaacaagaatcgacctgagccagctgggaggagacggaggaggaagcccgaagaagaagagaaaggtcagcgaaagcgcaacaccggaaagcgtcagcggatggagactgttcaagaagatcagctagctagccatcacatttaaaagcatctcagcctaccatgagaataagagaaagaaaatgaagatcaatagcttattcatctctttttctttttcgttggtgtaaagccaacaccctgtctaaaaaacataaatttctttaatcattttgcctcttttctctgtgcttcaattaataaaaaatggaaagaacctcgagaaaaaaaaaaaaaaaaaaaaaaaaaaaaaaaaaaaaaaaaaaaaaaaaaaaaaaaaaaaaaaaaaaaaaaaaaaaaaaaa

SEQ ID NO: 381 - DNA, 4524 bp, Artificial Sequence
  Synthetic: mRNA transcript with ORF encoding Cas9 with HiBiT tag, CMV-2 5 UTR and human ALB 3 UTR
gggagaagacaccgggaccgatccagcctccgcggccgggaacggcgccaccatggacaagaagtacagcatcggactggacatcggaacaaacagcgtcggatgggcagtcatcacagacgaatacaaggtcccgagcaagaagttcaaggtcctgggaaacacagacagacacagcatcaagaagaacctgatcggagcactgctgttcgacagcggagaaacagcagaagcaacaagactgaagagaacagcaagaagaagatacacaagaagaaagaacagaatctgctacctgcaggaaatcttcagcaacgaaatggcaaaggtcgacgacagcttcttccacagactggaagaaagcttcctggtcgaagaagacaagaagcacgaaagacacccgatcttcggaaacatcgtcgacgaagtcgcataccacgaaaagtacccgacaatctaccacctgagaaagaagctggtcgacagcacagacaaggcagacctgagactgatctacctggcactggcacacatgatcaagttcagaggacacttcctgatcgaaggagacctgaacccggacaacagcgacgtcgacaagctgttcatccagctggtccagacatacaaccagctgttcgaagaaaacccgatcaacgcaagcggagtcgacgcaaaggcaatcctgagcgcaagactgagcaagagcagaagactggaaaacctgatcgcacagctgccgggagaaaagaagaacggactgttcggaaacctgatcgcactgagcctgggactgacaccgaacttcaagagcaacttcgacctggcagaagacgcaaagctgcagctgagcaaggacacatacgacgacgacctggacaacctgctggcacagatcggagaccagtacgcagacctgttcctggcagcaaagaacctgagcgacgcaatcctgctgagcgacatcctgagagtcaacacagaaatcacaaaggcaccgctgagcgcaagcatgatcaagagatacgacgaacaccaccaggacctgacactgctgaaggcactggtcagacagcagctgccggaaaagtacaaggaaatcttcttcgaccagagcaagaacggatacgcaggatacatcgacggaggagcaagccaggaagaattctacaagttcatcaagccgatcctggaaaagatggacggaacagaagaactgctggtcaagctgaacagagaagacctgctgagaaagcagagaacattcgacaacggaagcatcccgcaccagatccacctgggagaactgcacgcaatcctgagaagacaggaagacttctacccgttcctgaaggacaacagagaaaagatcgaaaagatcctgacattcagaatcccgtactacgtcggaccgctggcaagaggaaacagcagattcgcatggatgacaagaaagagcgaagaaacaatcacaccgtggaacttcgaagaagtcgtcgacaagggagcaagcgcacagagcttcatcgaaagaatgacaaacttcgacaagaacctgccgaacgaaaaggtcctgccgaagcacagcctgctgtacgaatacttcacagtctacaacgaactgacaaaggtcaagtacgtcacagaaggaatgagaaagccggcattcctgagcggagaacagaagaaggcaatcgtcgacctgctgttcaagacaaacagaaaggtcacagtcaagcagctgaaggaagactacttcaagaagatcgaatgcttcgacagcgtcgaaatcagcggagtcgaagacagattcaacgcaagcctgggaacataccacgacctgctgaagatcatcaaggacaaggacttcctggacaacgaagaaaacgaagacatcctggaagacatcgtcctgacactgacactgttcgaagacagagaaatgatcgaagaaagactgaagacatacgcacacctgttcgacgacaaggtcatgaagcagctgaagagaagaagatacacaggatggggaagactgagcagaaagctgatcaacggaatcagagacaagcagagcggaaagacaatcctggacttcctgaagagcgacggattcgcaaacagaaacttcatgcagctgatccacgacgacagcctgacattcaaggaagacatccagaaggcacaggtcagcggacagggagacagcctgcacgaacacatcgcaaacctggcaggaagcccggcaatcaagaagggaatcctgcagacagtcaaggtcgtcgacgaactggtcaaggtcatgggaagacacaagccggaaaacatcgtcatcgaaatggcaagagaaaaccagacaacacagaagggacagaagaacagcagagaaagaatgaagagaatcgaagaaggaatcaaggaactgggaagccagatcctgaaggaacacccggtcgaaaacacacagctgcagaacgaaaagctgtacctgtactacctgcagaacggaagagacatgtacgtcgaccaggaactggacatcaacagactgagcgactacgacgtcgaccacatcgtcccgcagagcttcctgaaggacgacagcatcgacaacaaggtcctgacaagaagcgacaagaacagaggaaagagcgacaacgtcccgagcgaagaagtcgtcaagaagatgaagaactactggagacagctgctgaacgcaaagctgatcacacagagaaagttcgacaacctgacaaaggcagagagaggaggactgagcgaactggacaaggcaggattcatcaagagacagctggtcgaaacaagacagatcacaaagcacgtcgcacagatcctggacagcagaatgaacacaaagtacgacgaaaacgacaagctgatcagagaagtcaaggtcatcacactgaagagcaagctggtcagcgacttcagaaaggacttccagttctacaaggtcagagaaatcaacaactaccaccacgcacacgacgcatacctgaacgcagtcgtcggaacagcactgatcaagaagtacccgaagctggaaagcgaattcgtctacggagactacaaggtctacgacgtcagaaagatgatcgcaaagagcgaacaggaaatcggaaaggcaacagcaaagtacttcttctacagcaacatcatgaacttcttcaagacagaaatcacactggcaaacggagaaatcagaaagagaccgctgatcgaaacaaacggagaaacaggagaaatcgtctgggacaagggaagagacttcgcaacagtcagaaaggtcctgagcatgccgcaggtcaacatcgtcaagaagacagaagtccagacaggaggattcagcaaggaaagcatcctgccgaagagaaacagcgacaagctgatcgcaagaaagaaggactgggacccgaagaagtacggaggattcgacagcccgacagtcgcatacagcgtcctggtcgtcgcaaaggtcgaaaagggaaagagcaagaagctgaagagcgtcaaggaactgctgggaatcacaatcatggaaagaagcagcttcgaaaagaacccgatcgacttcctggaagcaaagggatacaaggaagtcaagaaggacctgatcatcaagctgccgaagtacagcctgttcgaactggaaaacggaagaaagagaatgctggcaagcgcaggagaactgcagaagggaaacgaactggcactgccgagcaagtacgtcaacttcctgtacctggcaagccactacgaaaagctgaagggaagcccggaagacaacgaacagaagcagctgttcgtcgaacagcacaagcactacctggacgaaatcatcgaacagatcagcgaattcagcaagagagtcatcctggcagacgcaaacctggacaaggtcctgagcgcatacaacaagcacagagacaagccgatcagagaacaggcagaaaacatcatccacctgttcacactgacaaacctgggagcaccggcagcattcaagtacttcgacacaacaatcgacagaaagagatacacaagcacaaaggaagtcctggacgcaacactgatccaccagagcatcacaggactgtacgaaacaagaatcgacctgagccagctgggaggagacggaggaggaagcccgaagaagaagagaaaggtcagcgaaagcgcaacaccggaaagcgtcagcggatggagactgttcaagaagatcagctagctagccatcacatttaaaagcatctcagcctaccatgagaataagagaaagaaaatgaagatcaatagcttattcatctctttttctttttcgttggtgtaaagccaacaccctgtctaaaaaacataaatttctttaatcattttgcctcttttctctgtgcttcaattaataaaaaatggaaagaacctcgagaaaaaaaaaaaaaaaaaaaaaaaaaaaaaaaaaaaaaaaaaaaaaaaaaaaaaaaaaaaaaaaaaaaaaaaaaaaaaaaa

SEQ ID NO: 382 - DNA, 4524 bp, Artificial Sequence
  Synthetic: mRNA transcript with ORF encoding Cas9 with HiBiT tag, CMV-3 5 UTR and human ALB 3 UTR
gggtgcattggaacgcggattccccgtgccaagagtgactcaccgcgccaccatggacaagaagtacagcatcggactggacatcggaacaaacagcgtcggatgggcagtcatcacagacgaatacaaggtcccgagcaagaagttcaaggtcctgggaaacacagacagacacagcatcaagaagaacctgatcggagcactgctgttcgacagcggagaaacagcagaagcaacaagactgaagagaacagcaagaagaagatacacaagaagaaagaacagaatctgctacctgcaggaaatcttcagcaacgaaatggcaaaggtcgacgacagcttcttccacagactggaagaaagcttcctggtcgaagaagacaagaagcacgaaagacacccgatcttcggaaacatcgtcgacgaagtcgcataccacgaaaagtacccgacaatctaccacctgagaaagaagctggtcgacagcacagacaaggcagacctgagactgatctacctggcactggcacacatgatcaagttcagaggacacttcctgatcgaaggagacctgaacccggacaacagcgacgtcgacaagctgttcatccagctggtccagacatacaaccagctgttcgaagaaaacccgatcaacgcaagcggagtcgacgcaaaggcaatcctgagcgcaagactgagcaagagcagaagactggaaaacctgatcgcacagctgccgggagaaaagaagaacggactgttcggaaacctgatcgcactgagcctgggactgacaccgaacttcaagagcaacttcgacctggcagaagacgcaaagctgcagctgagcaaggacacatacgacgacgacctggacaacctgctggcacagatcggagaccagtacgcagacctgttcctggcagcaaagaacctgagcgacgcaatcctgctgagcgacatcctgagagtcaacacagaaatcacaaaggcaccgctgagcgcaagcatgatcaagagatacgacgaacaccaccaggacctgacactgctgaaggcactggtcagacagcagctgccggaaaagtacaaggaaatcttcttcgaccagagcaagaacggatacgcaggatacatcgacggaggagcaagccaggaagaattctacaagttcatcaagccgatcctggaaaagatggacggaacagaagaactgctggtcaagctgaacagagaagacctgctgagaaagcagagaacattcgacaacggaagcatcccgcaccagatccacctgggagaactgcacgcaatcctgagaagacaggaagacttctacccgttcctgaaggacaacagagaaaagatcgaaaagatcctgacattcagaatcccgtactacgtcggaccgctggcaagaggaaacagcagattcgcatggatgacaagaaagagcgaagaaacaatcacaccgtggaacttcgaagaagtcgtcgacaagggagcaagcgcacagagcttcatcgaaagaatgacaaacttcgacaagaacctgccgaacgaaaaggtcctgccgaagcacagcctgctgtacgaatacttcacagtctacaacgaactgacaaaggtcaagtacgtcacagaaggaatgagaaagccggcattcctgagcggagaacagaagaaggcaatcgtcgacctgctgttcaagacaaacagaaaggtcacagtcaagcagctgaaggaagactacttcaagaagatcgaatgcttcgacagcgtcgaaatcagcggagtcgaagacagattcaacgcaagcctgggaacataccacgacctgctgaagatcatcaaggacaaggacttcctggacaacgaagaaaacgaagacatcctggaagacatcgtcctgacactgacactgttcgaagacagagaaatgatcgaagaaagactgaagacatacgcacacctgttcgacgacaaggtcatgaagcagctgaagagaagaagatacacaggatggggaagactgagcagaaagctgatcaacggaatcagagacaagcagagcggaaagacaatcctggacttcctgaagagcgacggattcgcaaacagaaacttcatgcagctgatccacgacgacagcctgacattcaaggaagacatccagaaggcacaggtcagcggacagggagacagcctgcacgaacacatcgcaaacctggcaggaagcccggcaatcaagaagggaatcctgcagacagtcaaggtcgtcgacgaactggtcaaggtcatgggaagacacaagccggaaaacatcgtcatcgaaatggcaagagaaaaccagacaacacagaagggacagaagaacagcagagaaagaatgaagagaatcgaagaaggaatcaaggaactgggaagccagatcctgaaggaacacccggtcgaaaacacacagctgcagaacgaaaagctgtacctgtactacctgcagaacggaagagacatgtacgtcgaccaggaactggacatcaacagactgagcgactacgacgtcgaccacatcgtcccgcagagcttcctgaaggacgacagcatcgacaacaaggtcctgacaagaagcgacaagaacagaggaaagagcgacaacgtcccgagcgaagaagtcgtcaagaagatgaagaactactggagacagctgctgaacgcaaagctgatcacacagagaaagttcgacaacctgacaaaggcagagagaggaggactgagcgaactggacaaggcaggattcatcaagagacagctggtcgaaacaagacagatcacaaagcacgtcgcacagatcctggacagcagaatgaacacaaagtacgacgaaaacgacaagctgatcagagaagtcaaggtcatcacactgaagagcaagctggtcagcgacttcagaaaggacttccagttctacaaggtcagagaaatcaacaactaccaccacgcacacgacgcatacctgaacgcagtcgtcggaacagcactgatcaagaagtacccgaagctggaaagcgaattcgtctacggagactacaaggtctacgacgtcagaaagatgatcgcaaagagcgaacaggaaatcggaaaggcaacagcaaagtacttcttctacagcaacatcatgaacttcttcaagacagaaatcacactggcaaacggagaaatcagaaagagaccgctgatcgaaacaaacggagaaacaggagaaatcgtctgggacaagggaagagacttcgcaacagtcagaaaggtcctgagcatgccgcaggtcaacatcgtcaagaagacagaagtccagacaggaggattcagcaaggaaagcatcctgccgaagagaaacagcgacaagctgatcgcaagaaagaaggactgggacccgaagaagtacggaggattcgacagcccgacagtcgcatacagcgtcctggtcgtcgcaaaggtcgaaaagggaaagagcaagaagctgaagagcgtcaaggaactgctgggaatcacaatcatggaaagaagcagcttcgaaaagaacccgatcgacttcctggaagcaaagggatacaaggaagtcaagaaggacctgatcatcaagctgccgaagtacagcctgttcgaactggaaaacggaagaaagagaatgctggcaagcgcaggagaactgcagaagggaaacgaactggcactgccgagcaagtacgtcaacttcctgtacctggcaagccactacgaaaagctgaagggaagcccggaagacaacgaacagaagcagctgttcgtcgaacagcacaagcactacctggacgaaatcatcgaacagatcagcgaattcagcaagagagtcatcctggcagacgcaaacctggacaaggtcctgagcgcatacaacaagcacagagacaagccgatcagagaacaggcagaaaacatcatccacctgttcacactgacaaacctgggagcaccggcagcattcaagtacttcgacacaacaatcgacagaaagagatacacaagcacaaaggaagtcctggacgcaacactgatccaccagagcatcacaggactgtacgaaacaagaatcgacctgagccagctgggaggagacggaggaggaagcccgaagaagaagagaaaggtcagcgaaagcgcaacaccggaaagcgtcagcggatggagactgttcaagaagatcagctagctagccatcacatttaaaagcatctcagcctaccatgagaataagagaaagaaaatgaagatcaatagcttattcatctctttttctttttcgttggtgtaaagccaacaccctgtctaaaaaacataaatttctttaatcattttgcctcttttctctgtgcttcaattaataaaaaatggaaagaacctcgagaaaaaaaaaaaaaaaaaaaaaaaaaaaaaaaaaaaaaaaaaaaaaaaaaaaaaaaaaaaaaaaaaaaaaaaaaaaaaaaa

SEQ ID NO: 383 - DNA, 4548 bp, Artificial Sequence
  Synthetic: mRNA transcript with ORF encoding Cas9 with HiBiT tag, HBA 5 UTR and human ALB 3 UTR
gggcataaaccctggcgcgctcgcggcccggcactcttctggtccccacagactcagagagaacccacccgccaccatggacaagaagtacagcatcggactggacatcggaacaaacagcgtcggatgggcagtcatcacagacgaatacaaggtcccgagcaagaagttcaaggtcctgggaaacacagacagacacagcatcaagaagaacctgatcggagcactgctgttcgacagcggagaaacagcagaagcaacaagactgaagagaacagcaagaagaagatacacaagaagaaagaacagaatctgctacctgcaggaaatcttcagcaacgaaatggcaaaggtcgacgacagcttcttccacagactggaagaaagcttcctggtcgaagaagacaagaagcacgaaagacacccgatcttcggaaacatcgtcgacgaagtcgcataccacgaaaagtacccgacaatctaccacctgagaaagaagctggtcgacagcacagacaaggcagacctgagactgatctacctggcactggcacacatgatcaagttcagaggacacttcctgatcgaaggagacctgaacccggacaacagcgacgtcgacaagctgttcatccagctggtccagacatacaaccagctgttcgaagaaaacccgatcaacgcaagcggagtcgacgcaaaggcaatcctgagcgcaagactgagcaagagcagaagactggaaaacctgatcgcacagctgccgggagaaaagaagaacggactgttcggaaacctgatcgcactgagcctgggactgacaccgaacttcaagagcaacttcgacctggcagaagacgcaaagctgcagctgagcaaggacacatacgacgacgacctggacaacctgctggcacagatcggagaccagtacgcagacctgttcctggcagcaaagaacctgagcgacgcaatcctgctgagcgacatcctgagagtcaacacagaaatcacaaaggcaccgctgagcgcaagcatgatcaagagatacgacgaacaccaccaggacctgacactgctgaaggcactggtcagacagcagctgccggaaaagtacaaggaaatcttcttcgaccagagcaagaacggatacgcaggatacatcgacggaggagcaagccaggaagaattctacaagttcatcaagccgatcctggaaaagatggacggaacagaagaactgctggtcaagctgaacagagaagacctgctgagaaagcagagaacattcgacaacggaagcatcccgcaccagatccacctgggagaactgcacgcaatcctgagaagacaggaagacttctacccgttcctgaaggacaacagagaaaagatcgaaaagatcctgacattcagaatcccgtactacgtcggaccgctggcaagaggaaacagcagattcgcatggatgacaagaaagagcgaagaaacaatcacaccgtggaacttcgaagaagtcgtcgacaagggagcaagcgcacagagcttcatcgaaagaatgacaaacttcgacaagaacctgccgaacgaaaaggtcctgccgaagcacagcctgctgtacgaatacttcacagtctacaacgaactgacaaaggtcaagtacgtcacagaaggaatgagaaagccggcattcctgagcggagaacagaagaaggcaatcgtcgacctgctgttcaagacaaacagaaaggtcacagtcaagcagctgaaggaagactacttcaagaagatcgaatgcttcgacagcgtcgaaatcagcggagtcgaagacagattcaacgcaagcctgggaacataccacgacctgctgaagatcatcaaggacaaggacttcctggacaacgaagaaaacgaagacatcctggaagacatcgtcctgacactgacactgttcgaagacagagaaatgatcgaagaaagactgaagacatacgcacacctgttcgacgacaaggtcatgaagcagctgaagagaagaagatacacaggatggggaagactgagcagaaagctgatcaacggaatcagagacaagcagagcggaaagacaatcctggacttcctgaagagcgacggattcgcaaacagaaacttcatgcagctgatccacgacgacagcctgacattcaaggaagacatccagaaggcacaggtcagcggacagggagacagcctgcacgaacacatcgcaaacctggcaggaagcccggcaatcaagaagggaatcctgcagacagtcaaggtcgtcgacgaactggtcaaggtcatgggaagacacaagccggaaaacatcgtcatcgaaatggcaagagaaaaccagacaacacagaagggacagaagaacagcagagaaagaatgaagagaatcgaagaaggaatcaaggaactgggaagccagatcctgaaggaacacccggtcgaaaacacacagctgcagaacgaaaagctgtacctgtactacctgcagaacggaagagacatgtacgtcgaccaggaactggacatcaacagactgagcgactacgacgtcgaccacatcgtcccgcagagcttcctgaaggacgacagcatcgacaacaaggtcctgacaagaagcgacaagaacagaggaaagagcgacaacgtcccgagcgaagaagtcgtcaagaagatgaagaactactggagacagctgctgaacgcaaagctgatcacacagagaaagttcgacaacctgacaaaggcagagagaggaggactgagcgaactggacaaggcaggattcatcaagagacagctggtcgaaacaagacagatcacaaagcacgtcgcacagatcctggacagcagaatgaacacaaagtacgacgaaaacgacaagctgatcagagaagtcaaggtcatcacactgaagagcaagctggtcagcgacttcagaaaggacttccagttctacaaggtcagagaaatcaacaactaccaccacgcacacgacgcatacctgaacgcagtcgtcggaacagcactgatcaagaagtacccgaagctggaaagcgaattcgtctacggagactacaaggtctacgacgtcagaaagatgatcgcaaagagcgaacaggaaatcggaaaggcaacagcaaagtacttcttctacagcaacatcatgaacttcttcaagacagaaatcacactggcaaacggagaaatcagaaagagaccgctgatcgaaacaaacggagaaacaggagaaatcgtctgggacaagggaagagacttcgcaacagtcagaaaggtcctgagcatgccgcaggtcaacatcgtcaagaagacagaagtccagacaggaggattcagcaaggaaagcatcctgccgaagagaaacagcgacaagctgatcgcaagaaagaaggactgggacccgaagaagtacggaggattcgacagcccgacagtcgcatacagcgtcctggtcgtcgcaaaggtcgaaaagggaaagagcaagaagctgaagagcgtcaaggaactgctgggaatcacaatcatggaaagaagcagcttcgaaaagaacccgatcgacttcctggaagcaaagggatacaaggaagtcaagaaggacctgatcatcaagctgccgaagtacagcctgttcgaactggaaaacggaagaaagagaatgctggcaagcgcaggagaactgcagaagggaaacgaactggcactgccgagcaagtacgtcaacttcctgtacctggcaagccactacgaaaagctgaagggaagcccggaagacaacgaacagaagcagctgttcgtcgaacagcacaagcactacctggacgaaatcatcgaacagatcagcgaattcagcaagagagtcatcctggcagacgcaaacctggacaaggtcctgagcgcatacaacaagcacagagacaagccgatcagagaacaggcagaaaacatcatccacctgttcacactgacaaacctgggagcaccggcagcattcaagtacttcgacacaacaatcgacagaaagagatacacaagcacaaaggaagtcctggacgcaacactgatccaccagagcatcacaggactgtacgaaacaagaatcgacctgagccagctgggaggagacggaggaggaagcccgaagaagaagagaaaggtcagcgaaagcgcaacaccggaaagcgtcagcggatggagactgttcaagaagatcagctagctagccatcacatttaaaagcatctcagcctaccatgagaataagagaaagaaaatgaagatcaatagcttattcatctctttttctttttcgttggtgtaaagccaacaccctgtctaaaaaacataaatttctttaatcattttgcctcttttctctgtgcttcaattaataaaaaatggaaagaacctcgagaaaaaaaaaaaaaaaaaaaaaaaaaaaaaaaaaaaaaaaaaaaaaaaaaaaaaaaaaaaaaaaaaaaaaaaaaaaaaaaa

SEQ ID NO: 384 - DNA, 4538 bp, Artificial Sequence
  Synthetic: mRNA transcript with ORF encoding Cas9 with HiBiT tag, HBB 5 UTR and human ALB 3 UTR
gggacatttgcttctgacacaactgtgttcactagcaacctcaaacagacaccggatctcgccaccatggacaagaagtacagcatcggactggacatcggaacaaacagcgtcggatgggcagtcatcacagacgaatacaaggtcccgagcaagaagttcaaggtcctgggaaacacagacagacacagcatcaagaagaacctgatcggagcactgctgttcgacagcggagaaacagcagaagcaacaagactgaagagaacagcaagaagaagatacacaagaagaaagaacagaatctgctacctgcaggaaatcttcagcaacgaaatggcaaaggtcgacgacagcttcttccacagactggaagaaagcttcctggtcgaagaagacaagaagcacgaaagacacccgatcttcggaaacatcgtcgacgaagtcgcataccacgaaaagtacccgacaatctaccacctgagaaagaagctggtcgacagcacagacaaggcagacctgagactgatctacctggcactggcacacatgatcaagttcagaggacacttcctgatcgaaggagacctgaacccggacaacagcgacgtcgacaagctgttcatccagctggtccagacatacaaccagctgttcgaagaaaacccgatcaacgcaagcggagtcgacgcaaaggcaatcctgagcgcaagactgagcaagagcagaagactggaaaacctgatcgcacagctgccgggagaaaagaagaacggactgttcggaaacctgatcgcactgagcctgggactgacaccgaacttcaagagcaacttcgacctggcagaagacgcaaagctgcagctgagcaaggacacatacgacgacgacctggacaacctgctggcacagatcggagaccagtacgcagacctgttcctggcagcaaagaacctgagcgacgcaatcctgctgagcgacatcctgagagtcaacacagaaatcacaaaggcaccgctgagcgcaagcatgatcaagagatacgacgaacaccaccaggacctgacactgctgaaggcactggtcagacagcagctgccggaaaagtacaaggaaatcttcttcgaccagagcaagaacggatacgcaggatacatcgacggaggagcaagccaggaagaattctacaagttcatcaagccgatcctggaaaagatggacggaacagaagaactgctggtcaagctgaacagagaagacctgctgagaaagcagagaacattcgacaacggaagcatcccgcaccagatccacctgggagaactgcacgcaatcctgagaagacaggaagacttctacccgttcctgaaggacaacagagaaaagatcgaaaagatcctgacattcagaatcccgtactacgtcggaccgctggcaagaggaaacagcagattcgcatggatgacaagaaagagcgaagaaacaatcacaccgtggaacttcgaagaagtcgtcgacaagggagcaagcgcacagagcttcatcgaaagaatgacaaacttcgacaagaacctgccgaacgaaaaggtcctgccgaagcacagcctgctgtacgaatacttcacagtctacaacgaactgacaaaggtcaagtacgtcacagaaggaatgagaaagccggcattcctgagcggagaacagaagaaggcaatcgtcgacctgctgttcaagacaaacagaaaggtcacagtcaagcagctgaaggaagactacttcaagaagatcgaatgcttcgacagcgtcgaaatcagcggagtcgaagacagattcaacgcaagcctgggaacataccacgacctgctgaagatcatcaaggacaaggacttcctggacaacgaagaaaacgaagacatcctggaagacatcgtcctgacactgacactgttcgaagacagagaaatgatcgaagaaagactgaagacatacgcacacctgttcgacgacaaggtcatgaagcagctgaagagaagaagatacacaggatggggaagactgagcagaaagctgatcaacggaatcagagacaagcagagcggaaagacaatcctggacttcctgaagagcgacggattcgcaaacagaaacttcatgcagctgatccacgacgacagcctgacattcaaggaagacatccagaaggcacaggtcagcggacagggagacagcctgcacgaacacatcgcaaacctggcaggaagcccggcaatcaagaagggaatcctgcagacagtcaaggtcgtcgacgaactggtcaaggtcatgggaagacacaagccggaaaacatcgtcatcgaaatggcaagagaaaaccagacaacacagaagggacagaagaacagcagagaaagaatgaagagaatcgaagaaggaatcaaggaactgggaagccagatcctgaaggaacacccggtcgaaaacacacagctgcagaacgaaaagctgtacctgtactacctgcagaacggaagagacatgtacgtcgaccaggaactggacatcaacagactgagcgactacgacgtcgaccacatcgtcccgcagagcttcctgaaggacgacagcatcgacaacaaggtcctgacaagaagcgacaagaacagaggaaagagcgacaacgtcccgagcgaagaagtcgtcaagaagatgaagaactactggagacagctgctgaacgcaaagctgatcacacagagaaagttcgacaacctgacaaaggcagagagaggaggactgagcgaactggacaaggcaggattcatcaagagacagctggtcgaaacaagacagatcacaaagcacgtcgcacagatcctggacagcagaatgaacacaaagtacgacgaaaacgacaagctgatcagagaagtcaaggtcatcacactgaagagcaagctggtcagcgacttcagaaaggacttccagttctacaaggtcagagaaatcaacaactaccaccacgcacacgacgcatacctgaacgcagtcgtcggaacagcactgatcaagaagtacccgaagctggaaagcgaattcgtctacggagactacaaggtctacgacgtcagaaagatgatcgcaaagagcgaacaggaaatcggaaaggcaacagcaaagtacttcttctacagcaacatcatgaacttcttcaagacagaaatcacactggcaaacggagaaatcagaaagagaccgctgatcgaaacaaacggagaaacaggagaaatcgtctgggacaagggaagagacttcgcaacagtcagaaaggtcctgagcatgccgcaggtcaacatcgtcaagaagacagaagtccagacaggaggattcagcaaggaaagcatcctgccgaagagaaacagcgacaagctgatcgcaagaaagaaggactgggacccgaagaagtacggaggattcgacagcccgacagtcgcatacagcgtcctggtcgtcgcaaaggtcgaaaagggaaagagcaagaagctgaagagcgtcaaggaactgctgggaatcacaatcatggaaagaagcagcttcgaaaagaacccgatcgacttcctggaagcaaagggatacaaggaagtcaagaaggacctgatcatcaagctgccgaagtacagcctgttcgaactggaaaacggaagaaagagaatgctggcaagcgcaggagaactgcagaagggaaacgaactggcactgccgagcaagtacgtcaacttcctgtacctggcaagccactacgaaaagctgaagggaagcccggaagacaacgaacagaagcagctgttcgtcgaacagcacaagcactacctggacgaaatcatcgaacagatcagcgaattcagcaagagagtcatcctggcagacgcaaacctggacaaggtcctgagcgcatacaacaagcacagagacaagccgatcagagaacaggcagaaaacatcatccacctgttcacactgacaaacctgggagcaccggcagcattcaagtacttcgacacaacaatcgacagaaagagatacacaagcacaaaggaagtcctggacgcaacactgatccaccagagcatcacaggactgtacgaaacaagaatcgacctgagccagctgggaggagacggaggaggaagcccgaagaagaagagaaaggtcagcgaaagcgcaacaccggaaagcgtcagcggatggagactgttcaagaagatcagctagctagccatcacatttaaaagcatctcagcctaccatgagaataagagaaagaaaatgaagatcaatagcttattcatctctttttctttttcgttggtgtaaagccaacaccctgtctaaaaaacataaatttctttaatcattttgcctcttttctctgtgcttcaattaataaaaaatggaaagaacctcgagaaaaaaaaaaaaaaaaaaaaaaaaaaaaaaaaaaaaaaaaaaaaaaaaaaaaaaaaaaaaaaaaaaaaaaaaaaaaaaaa

SEQ ID NO: 385 - DNA, 4517 bp, Artificial Sequence
  Synthetic: mRNA transcript with ORF encoding Cas9 with HiBiT tag, XBG 5 UTR and human ALB 3 UTR
gggaagctcagaataaacgctcaactttggccggatctcgccaccatggacaagaagtacagcatcggactggacatcggaacaaacagcgtcggatgggcagtcatcacagacgaatacaaggtcccgagcaagaagttcaaggtcctgggaaacacagacagacacagcatcaagaagaacctgatcggagcactgctgttcgacagcggagaaacagcagaagcaacaagactgaagagaacagcaagaagaagatacacaagaagaaagaacagaatctgctacctgcaggaaatcttcagcaacgaaatggcaaaggtcgacgacagcttcttccacagactggaagaaagcttcctggtcgaagaagacaagaagcacgaaagacacccgatcttcggaaacatcgtcgacgaagtcgcataccacgaaaagtacccgacaatctaccacctgagaaagaagctggtcgacagcacagacaaggcagacctgagactgatctacctggcactggcacacatgatcaagttcagaggacacttcctgatcgaaggagacctgaacccggacaacagcgacgtcgacaagctgttcatccagctggtccagacatacaaccagctgttcgaagaaaacccgatcaacgcaagcggagtcgacgcaaaggcaatcctgagcgcaagactgagcaagagcagaagactggaaaacctgatcgcacagctgccgggagaaaagaagaacggactgttcggaaacctgatcgcactgagcctgggactgacaccgaacttcaagagcaacttcgacctggcagaagacgcaaagctgcagctgagcaaggacacatacgacgacgacctggacaacctgctggcacagatcggagaccagtacgcagacctgttcctggcagcaaagaacctgagcgacgcaatcctgctgagcgacatcctgagagtcaacacagaaatcacaaaggcaccgctgagcgcaagcatgatcaagagatacgacgaacaccaccaggacctgacactgctgaaggcactggtcagacagcagctgccggaaaagtacaaggaaatcttcttcgaccagagcaagaacggatacgcaggatacatcgacggaggagcaagccaggaagaattctacaagttcatcaagccgatcctggaaaagatggacggaacagaagaactgctggtcaagctgaacagagaagacctgctgagaaagcagagaacattcgacaacggaagcatcccgcaccagatccacctgggagaactgcacgcaatcctgagaagacaggaagacttctacccgttcctgaaggacaacagagaaaagatcgaaaagatcctgacattcagaatcccgtactacgtcggaccgctggcaagaggaaacagcagattcgcatggatgacaagaaagagcgaagaaacaatcacaccgtggaacttcgaagaagtcgtcgacaagggagcaagcgcacagagcttcatcgaaagaatgacaaacttcgacaagaacctgccgaacgaaaaggtcctgccgaagcacagcctgctgtacgaatacttcacagtctacaacgaactgacaaaggtcaagtacgtcacagaaggaatgagaaagccggcattcctgagcggagaacagaagaaggcaatcgtcgacctgctgttcaagacaaacagaaaggtcacagtcaagcagctgaaggaagactacttcaagaagatcgaatgcttcgacagcgtcgaaatcagcggagtcgaagacagattcaacgcaagcctgggaacataccacgacctgctgaagatcatcaaggacaaggacttcctggacaacgaagaaaacgaagacatcctggaagacatcgtcctgacactgacactgttcgaagacagagaaatgatcgaagaaagactgaagacatacgcacacctgttcgacgacaaggtcatgaagcagctgaagagaagaagatacacaggatggggaagactgagcagaaagctgatcaacggaatcagagacaagcagagcggaaagacaatcctggacttcctgaagagcgacggattcgcaaacagaaacttcatgcagctgatccacgacgacagcctgacattcaaggaagacatccagaaggcacaggtcagcggacagggagacagcctgcacgaacacatcgcaaacctggcaggaagcccggcaatcaagaagggaatcctgcagacagtcaaggtcgtcgacgaactggtcaaggtcatgggaagacacaagccggaaaacatcgtcatcgaaatggcaagagaaaaccagacaacacagaagggacagaagaacagcagagaaagaatgaagagaatcgaagaaggaatcaaggaactgggaagccagatcctgaaggaacacccggtcgaaaacacacagctgcagaacgaaaagctgtacctgtactacctgcagaacggaagagacatgtacgtcgaccaggaactggacatcaacagactgagcgactacgacgtcgaccacatcgtcccgcagagcttcctgaaggacgacagcatcgacaacaaggtcctgacaagaagcgacaagaacagaggaaagagcgacaacgtcccgagcgaagaagtcgtcaagaagatgaagaactactggagacagctgctgaacgcaaagctgatcacacagagaaagttcgacaacctgacaaaggcagagagaggaggactgagcgaactggacaaggcaggattcatcaagagacagctggtcgaaacaagacagatcacaaagcacgtcgcacagatcctggacagcagaatgaacacaaagtacgacgaaaacgacaagctgatcagagaagtcaaggtcatcacactgaagagcaagctggtcagcgacttcagaaaggacttccagttctacaaggtcagagaaatcaacaactaccaccacgcacacgacgcatacctgaacgcagtcgtcggaacagcactgatcaagaagtacccgaagctggaaagcgaattcgtctacggagactacaaggtctacgacgtcagaaagatgatcgcaaagagcgaacaggaaatcggaaaggcaacagcaaagtacttcttctacagcaacatcatgaacttcttcaagacagaaatcacactggcaaacggagaaatcagaaagagaccgctgatcgaaacaaacggagaaacaggagaaatcgtctgggacaagggaagagacttcgcaacagtcagaaaggtcctgagcatgccgcaggtcaacatcgtcaagaagacagaagtccagacaggaggattcagcaaggaaagcatcctgccgaagagaaacagcgacaagctgatcgcaagaaagaaggactgggacccgaagaagtacggaggattcgacagcccgacagtcgcatacagcgtcctggtcgtcgcaaaggtcgaaaagggaaagagcaagaagctgaagagcgtcaaggaactgctgggaatcacaatcatggaaagaagcagcttcgaaaagaacccgatcgacttcctggaagcaaagggatacaaggaagtcaagaaggacctgatcatcaagctgccgaagtacagcctgttcgaactggaaaacggaagaaagagaatgctggcaagcgcaggagaactgcagaagggaaacgaactggcactgccgagcaagtacgtcaacttcctgtacctggcaagccactacgaaaagctgaagggaagcccggaagacaacgaacagaagcagctgttcgtcgaacagcacaagcactacctggacgaaatcatcgaacagatcagcgaattcagcaagagagtcatcctggcagacgcaaacctggacaaggtcctgagcgcatacaacaagcacagagacaagccgatcagagaacaggcagaaaacatcatccacctgttcacactgacaaacctgggagcaccggcagcattcaagtacttcgacacaacaatcgacagaaagagatacacaagcacaaaggaagtcctggacgcaacactgatccaccagagcatcacaggactgtacgaaacaagaatcgacctgagccagctgggaggagacggaggaggaagcccgaagaagaagagaaaggtcagcgaaagcgcaacaccggaaagcgtcagcggatggagactgttcaagaagatcagctagctagccatcacatttaaaagcatctcagcctaccatgagaataagagaaagaaaatgaagatcaatagcttattcatctctttttctttttcgttggtgtaaagccaacaccctgtctaaaaaacataaatttctttaatcattttgcctcttttctctgtgcttcaattaataaaaaatggaaagaacctcgagaaaaaaaaaaaaaaaaaaaaaaaaaaaaaaaaaaaaaaaaaaaaaaaaaaaaaaaaaaaaaaaaaaaaaaaaaaaaaaaa

SEQ ID NO: 386 - protein, 1381 aa, Artificial Sequence
  Synthetic: Amino acid sequence for Cas9 with NLS1
MDKKYSIGLDIGTNSVGWAVITDEYKVPSKKFKVLGNTDRHSIKKNLIGALLFDSGETAEATRLKRTARRRYTRRKNRICYLQEIFSNEMAKVDDSFFHRLEESFLVEEDKKHERHPIFGNIVDEVAYHEKYPTIYHLRKKLVDSTDKADLRLIYLALAHMIKFRGHFLIEGDLNPDNSDVDKLFIQLVQTYNQLFEENPINASGVDAKAILSARLSKSRRLENLIAQLPGEKKNGLFGNLIALSLGLTPNFKSNFDLAEDAKLQLSKDTYDDDLDNLLAQIGDQYADLFLAAKNLSDAILLSDILRVNTEITKAPLSASMIKRYDEHHQDLTLLKALVRQQLPEKYKEIFFDQSKNGYAGYIDGGASQEEFYKFIKPILEKMDGTEELLVKLNREDLLRKQRTFDNGSIPHQIHLGELHAILRRQEDFYPFLKDNREKIEKILTFRIPYYVGPLARGNSRFAWMTRKSEETITPWNFEEVVDKGASAQSFIERMTNFDKNLPNEKVLPKHSLLYEYFTVYNELTKVKYVTEGMRKPAFLSGEQKKAIVDLLFKTNRKVTVKQLKEDYFKKIECFDSVEISGVEDRFNASLGTYHDLLKIIKDKDFLDNEENEDILEDIVLTLTLFEDREMIEERLKTYAHLFDDKVMKQLKRRRYTGWGRLSRKLINGIRDKQSGKTILDFLKSDGFANRNFMQLIHDDSLTFKEDIQKAQVSGQGDSLHEHIANLAGSPAIKKGILQTVKVVDELVKVMGRHKPENIVIEMARENQTTQKGQKNSRERMKRIEEGIKELGSQILKEHPVENTQLQNEKLYLYYLQNGRDMYVDQELDINRLSDYDVDHIVPQSFLKDDSIDNKVLTRSDKNRGKSDNVPSEEVVKKMKNYWRQLLNAKLITQRKFDNLTKAERGGLSELDKAGFIKRQLVETRQITKHVAQILDSRMNTKYDENDKLIREVKVITLKSKLVSDFRKDFQFYKVREINNYHHAHDAYLNAVVGTALIKKYPKLESEFVYGDYKVYDVRKMIAKSEQEIGKATAKYFFYSNIMNFFKTEITLANGEIRKRPLIETNGETGEIVWDKGRDFATVRKVLSMPQVNIVKKTEVQTGGFSKESILPKRNSDKLIARKKDWDPKKYGGFDSPTVAYSVLVVAKVEKGKSKKLKSVKELLGITIMERSSFEKNPIDFLEAKGYKEVKKDLIIKLPKYSLFELENGRKRMLASAGELQKGNELALPSKYVNFLYLASHYEKLKGSPEDNEQKQLFVEQHKHYLDEIIEQISEFSKRVILADANLDKVLSAYNKHRDKPIREQAENIIHLFTLTNLGAPAAFKYFDTTIDRKRYTSTKEVLDATLIHQSITGLYETRIDLSQLGGDGGGSLAAKRSRTT

SEQ ID NO: 387 - protein, 1381 aa, Artificial Sequence
  Synthetic: Amino acid sequence for Cas9 with NLS2
MDKKYSIGLDIGTNSVGWAVITDEYKVPSKKFKVLGNTDRHSIKKNLIGALLFDSGETAEATRLKRTARRRYTRRKNRICYLQEIFSNEMAKVDDSFFHRLEESFLVEEDKKHERHPIFGNIVDEVAYHEKYPTIYHLRKKLVDSTDKADLRLIYLALAHMIKFRGHFLIEGDLNPDNSDVDKLFIQLVQTYNQLFEENPINASGVDAKAILSARLSKSRRLENLIAQLPGEKKNGLFGNLIALSLGLTPNFKSNFDLAEDAKLQLSKDTYDDDLDNLLAQIGDQYADLFLAAKNLSDAILLSDILRVNTEITKAPLSASMIKRYDEHHQDLTLLKALVRQQLPEKYKEIFFDQSKNGYAGYIDGGASQEEFYKFIKPILEKMDGTEELLVKLNREDLLRKQRTFDNGSIPHQIHLGELHAILRRQEDFYPFLKDNREKIEKILTFRIPYYVGPLARGNSRFAWMTRKSEETITPWNFEEVVDKGASAQSFIERMTNFDKNLPNEKVLPKHSLLYEYFTVYNELTKVKYVTEGMRKPAFLSGEQKKAIVDLLFKTNRKVTVKQLKEDYFKKIECFDSVEISGVEDRFNASLGTYHDLLKIIKDKDFLDNEENEDILEDIVLTLTLFEDREMIEERLKTYAHLFDDKVMKQLKRRRYTGWGRLSRKLINGIRDKQSGKTILDFLKSDGFANRNFMQLIHDDSLTFKEDIQKAQVSGQGDSLHEHIANLAGSPAIKKGILQTVKVVDELVKVMGRHKPENIVIEMARENQTTQKGQKNSRERMKRIEEGIKELGSQILKEHPVENTQLQNEKLYLYYLQNGRDMYVDQELDINRLSDYDVDHIVPQSFLKDDSIDNKVLTRSDKNRGKSDNVPSEEVVKKMKNYWRQLLNAKLITQRKFDNLTKAERGGLSELDKAGFIKRQLVETRQITKHVAQILDSRMNTKYDENDKLIREVKVITLKSKLVSDFRKDFQFYKVREINNYHHAHDAYLNAVVGTALIKKYPKLESEFVYGDYKVYDVRKMIAKSEQEIGKATAKYFFYSNIMNFFKTEITLANGEIRKRPLIETNGETGEIVWDKGRDFATVRKVLSMPQVNIVKKTEVQTGGFSKESILPKRNSDKLIARKKDWDPKKYGGFDSPTVAYSVLVVAKVEKGKSKKLKSVKELLGITIMERSSFEKNPIDFLEAKGYKEVKKDLIIKLPKYSLFELENGRKRMLASAGELQKGNELALPSKYVNFLYLASHYEKLKGSPEDNEQKQLFVEQHKHYLDEIIEQISEFSKRVILADANLDKVLSAYNKHRDKPIREQAENIIHLFTLTNLGAPAAFKYFDTTIDRKRYTSTKEVLDATLIHQSITGLYETRIDLSQLGGDGGGSQAAKRSRTT

SEQ ID NO: 388 - protein, 1382 aa, Artificial Sequence
  Synthetic: Amino acid sequence for Cas9 with NLS3
MDKKYSIGLDIGTNSVGWAVITDEYKVPSKKFKVLGNTDRHSIKKNLIGALLFDSGETAEATRLKRTARRRYTRRKNRICYLQEIFSNEMAKVDDSFFHRLEESFLVEEDKKHERHPIFGNIVDEVAYHEKYPTIYHLRKKLVDSTDKADLRLIYLALAHMIKFRGHFLIEGDLNPDNSDVDKLFIQLVQTYNQLFEENPINASGVDAKAILSARLSKSRRLENLIAQLPGEKKNGLFGNLIALSLGLTPNFKSNFDLAEDAKLQLSKDTYDDDLDNLLAQIGDQYADLFLAAKNLSDAILLSDILRVNTEITKAPLSASMIKRYDEHHQDLTLLKALVRQQLPEKYKEIFFDQSKNGYAGYIDGGASQEEFYKFIKPILEKMDGTEELLVKLNREDLLRKQRTFDNGSIPHQIHLGELHAILRRQEDFYPFLKDNREKIEKILTFRIPYYVGPLARGNSRFAWMTRKSEETITPWNFEEVVDKGASAQSFIERMTNFDKNLPNEKVLPKHSLLYEYFTVYNELTKVKYVTEGMRKPAFLSGEQKKAIVDLLFKTNRKVTVKQLKEDYFKKIECFDSVEISGVEDRFNASLGTYHDLLKIIKDKDFLDNEENEDILEDIVLTLTLFEDREMIEERLKTYAHLFDDKVMKQLKRRRYTGWGRLSRKLINGIRDKQSGKTILDFLKSDGFANRNFMQLIHDDSLTFKEDIQKAQVSGQGDSLHEHIANLAGSPAIKKGILQTVKVVDELVKVMGRHKPENIVIEMARENQTTQKGQKNSRERMKRIEEGIKELGSQILKEHPVENTQLQNEKLYLYYLQNGRDMYVDQELDINRLSDYDVDHIVPQSFLKDDSIDNKVLTRSDKNRGKSDNVPSEEVVKKMKNYWRQLLNAKLITQRKFDNLTKAERGGLSELDKAGFIKRQLVETRQITKHVAQILDSRMNTKYDENDKLIREVKVITLKSKLVSDFRKDFQFYKVREINNYHHAHDAYLNAVVGTALIKKYPKLESEFVYGDYKVYDVRKMIAKSEQEIGKATAKYFFYSNIMNFFKTEITLANGEIRKRPLIETNGETGEIVWDKGRDFATVRKVLSMPQVNIVKKTEVQTGGFSKESILPKRNSDKLIARKKDWDPKKYGGFDSPTVAYSVLVVAKVEKGKSKKLKSVKELLGITIMERSSFEKNPIDFLEAKGYKEVKKDLIIKLPKYSLFELENGRKRMLASAGELQKGNELALPSKYVNFLYLASHYEKLKGSPEDNEQKQLFVEQHKHYLDEIIEQISEFSKRVILADANLDKVLSAYNKHRDKPIREQAENIIHLFTLTNLGAPAAFKYFDTTIDRKRYTSTKEVLDATLIHQSITGLYETRIDLSQLGGDGGGSPAPAKRERTT

SEQ ID NO: 389 - protein, 1381 aa, Artificial Sequence
  Synthetic: Amino acid sequence for Cas9 with NLS4
MDKKYSIGLDIGTNSVGWAVITDEYKVPSKKFKVLGNTDRHSIKKNLIGALLFDSGETAEATRLKRTARRRYTRRKNRICYLQEIFSNEMAKVDDSFFHRLEESFLVEEDKKHERHPIFGNIVDEVAYHEKYPTIYHLRKKLVDSTDKADLRLIYLALAHMIKFRGHFLIEGDLNPDNSDVDKLFIQLVQTYNQLFEENPINASGVDAKAILSARLSKSRRLENLIAQLPGEKKNGLFGNLIALSLGLTPNFKSNFDLAEDAKLQLSKDTYDDDLDNLLAQIGDQYADLFLAAKNLSDAILLSDILRVNTEITKAPLSASMIKRYDEHHQDLTLLKALVRQQLPEKYKEIFFDQSKNGYAGYIDGGASQEEFYKFIKPILEKMDGTEELLVKLNREDLLRKQRTFDNGSIPHQIHLGELHAILRRQEDFYPFLKDNREKIEKILTFRIPYYVGPLARGNSRFAWMTRKSEETITPWNFEEVVDKGASAQSFIERMTNFDKNLPNEKVLPKHSLLYEYFTVYNELTKVKYVTEGMRKPAFLSGEQKKAIVDLLFKTNRKVTVKQLKEDYFKKIECFDSVEISGVEDRFNASLGTYHDLLKIIKDKDFLDNEENEDILEDIVLTLTLFEDREMIEERLKTYAHLFDDKVMKQLKRRRYTGWGRLSRKLINGIRDKQSGKTILDFLKSDGFANRNFMQLIHDDSLTFKEDIQKAQVSGQGDSLHEHIANLAGSPAIKKGILQTVKVVDELVKVMGRHKPENIVIEMARENQTTQKGQKNSRERMKRIEEGIKELGSQILKEHPVENTQLQNEKLYLYYLQNGRDMYVDQELDINRLSDYDVDHIVPQSFLKDDSIDNKVLTRSDKNRGKSDNVPSEEVVKKMKNYWRQLLNAKLITQRKFDNLTKAERGGLSELDKAGFIKRQLVETRQITKHVAQILDSRMNTKYDENDKLIREVKVITLKSKLVSDFRKDFQFYKVREINNYHHAHDAYLNAVVGTALIKKYPKLESEFVYGDYKVYDVRKMIAKSEQEIGKATAKYFFYSNIMNFFKTEITLANGEIRKRPLIETNGETGEIVWDKGRDFATVRKVLSMPQVNIVKKTEVQTGGFSKESILPKRNSDKLIARKKDWDPKKYGGFDSPTVAYSVLVVAKVEKGKSKKLKSVKELLGITIMERSSFEKNPIDFLEAKGYKEVKKDLIIKLPKYSLFELENGRKRMLASAGELQKGNELALPSKYVNFLYLASHYEKLKGSPEDNEQKQLFVEQHKHYLDEIIEQISEFSKRVILADANLDKVLSAYNKHRDKPIREQAENIIHLFTLTNLGAPAAFKYFDTTIDRKRYTSTKEVLDATLIHQSITGLYETRIDLSQLGGDGGGSQAAKRPRTT

SEQ ID NO: 390 - protein, 1381 aa, Artificial Sequence
  Synthetic: Amino acid sequence for Cas9 with NLS5
MDKKYSIGLDIGTNSVGWAVITDEYKVPSKKFKVLGNTDRHSIKKNLIGALLFDSGETAEATRLKRTARRRYTRRKNRICYLQEIFSNEMAKVDDSFFHRLEESFLVEEDKKHERHPIFGNIVDEVAYHEKYPTIYHLRKKLVDSTDKADLRLIYLALAHMIKFRGHFLIEGDLNPDNSDVDKLFIQLVQTYNQLFEENPINASGVDAKAILSARLSKSRRLENLIAQLPGEKKNGLFGNLIALSLGLTPNFKSNFDLAEDAKLQLSKDTYDDDLDNLLAQIGDQYADLFLAAKNLSDAILLSDILRVNTEITKAPLSASMIKRYDEHHQDLTLLKALVRQQLPEKYKEIFFDQSKNGYAGYIDGGASQEEFYKFIKPILEKMDGTEELLVKLNREDLLRKQRTFDNGSIPHQIHLGELHAILRRQEDFYPFLKDNREKIEKILTFRIPYYVGPLARGNSRFAWMTRKSEETITPWNFEEVVDKGASAQSFIERMTNFDKNLPNEKVLPKHSLLYEYFTVYNELTKVKYVTEGMRKPAFLSGEQKKAIVDLLFKTNRKVTVKQLKEDYFKKIECFDSVEISGVEDRFNASLGTYHDLLKIIKDKDFLDNEENEDILEDIVLTLTLFEDREMIEERLKTYAHLFDDKVMKQLKRRRYTGWGRLSRKLINGIRDKQSGKTILDFLKSDGFANRNFMQLIHDDSLTFKEDIQKAQVSGQGDSLHEHIANLAGSPAIKKGILQTVKVVDELVKVMGRHKPENIVIEMARENQTTQKGQKNSRERMKRIEEGIKELGSQILKEHPVENTQLQNEKLYLYYLQNGRDMYVDQELDINRLSDYDVDHIVPQSFLKDDSIDNKVLTRSDKNRGKSDNVPSEEVVKKMKNYWRQLLNAKLITQRKFDNLTKAERGGLSELDKAGFIKRQLVETRQITKHVAQILDSRMNTKYDENDKLIREVKVITLKSKLVSDFRKDFQFYKVREINNYHHAHDAYLNAVVGTALIKKYPKLESEFVYGDYKVYDVRKMIAKSEQEIGKATAKYFFYSNIMNFFKTEITLANGEIRKRPLIETNGETGEIVWDKGRDFATVRKVLSMPQVNIVKKTEVQTGGFSKESILPKRNSDKLIARKKDWDPKKYGGFDSPTVAYSVLVVAKVEKGKSKKLKSVKELLGITIMERSSFEKNPIDFLEAKGYKEVKKDLIIKLPKYSLFELENGRKRMLASAGELQKGNELALPSKYVNFLYLASHYEKLKGSPEDNEQKQLFVEQHKHYLDEIIEQISEFSKRVILADANLDKVLSAYNKHRDKPIREQAENIIHLFTLTNLGAPAAFKYFDTTIDRKRYTSTKEVLDATLIHQSITGLYETRIDLSQLGGDGGGSRAAKRPRTT

SEQ ID NO: 391 - protein, 1383 aa, Artificial Sequence
  Synthetic: Amino acid sequence for Cas9 with NLS6
MDKKYSIGLDIGTNSVGWAVITDEYKVPSKKFKVLGNTDRHSIKKNLIGALLFDSGETAEATRLKRTARRRYTRRKNRICYLQEIFSNEMAKVDDSFFHRLEESFLVEEDKKHERHPIFGNIVDEVAYHEKYPTIYHLRKKLVDSTDKADLRLIYLALAHMIKFRGHFLIEGDLNPDNSDVDKLFIQLVQTYNQLFEENPINASGVDAKAILSARLSKSRRLENLIAQLPGEKKNGLFGNLIALSLGLTPNFKSNFDLAEDAKLQLSKDTYDDDLDNLLAQIGDQYADLFLAAKNLSDAILLSDILRVNTEITKAPLSASMIKRYDEHHQDLTLLKALVRQQLPEKYKEIFFDQSKNGYAGYIDGGASQEEFYKFIKPILEKMDGTEELLVKLNREDLLRKQRTFDNGSIPHQIHLGELHAILRRQEDFYPFLKDNREKIEKILTFRIPYYVGPLARGNSRFAWMTRKSEETITPWNFEEVVDKGASAQSFIERMTNFDKNLPNEKVLPKHSLLYEYFTVYNELTKVKYVTEGMRKPAFLSGEQKKAIVDLLFKTNRKVTVKQLKEDYFKKIECFDSVEISGVEDRFNASLGTYHDLLKIIKDKDFLDNEENEDILEDIVLTLTLFEDREMIEERLKTYAHLFDDKVMKQLKRRRYTGWGRLSRKLINGIRDKQSGKTILDFLKSDGFANRNFMQLIHDDSLTFKEDIQKAQVSGQGDSLHEHIANLAGSPAIKKGILQTVKVVDELVKVMGRHKPENIVIEMARENQTTQKGQKNSRERMKRIEEGIKELGSQILKEHPVENTQLQNEKLYLYYLQNGRDMYVDQELDINRLSDYDVDHIVPQSFLKDDSIDNKVLTRSDKNRGKSDNVPSEEVVKKMKNYWRQLLNAKLITQRKFDNLTKAERGGLSELDKAGFIKRQLVETRQITKHVAQILDSRMNTKYDENDKLIREVKVITLKSKLVSDFRKDFQFYKVREINNYHHAHDAYLNAVVGTALIKKYPKLESEFVYGDYKVYDVRKMIAKSEQEIGKATAKYFFYSNIMNFFKTEITLANGEIRKRPLIETNGETGEIVWDKGRDFATVRKVLSMPQVNIVKKTEVQTGGFSKESILPKRNSDKLIARKKDWDPKKYGGFDSPTVAYSVLVVAKVEKGKSKKLKSVKELLGITIMERSSFEKNPIDFLEAKGYKEVKKDLIIKLPKYSLFELENGRKRMLASAGELQKGNELALPSKYVNFLYLASHYEKLKGSPEDNEQKQLFVEQHKHYLDEIIEQISEFSKRVILADANLDKVLSAYNKHRDKPIREQAENIIHLFTLTNLGAPAAFKYFDTTIDRKRYTSTKEVLDATLIHQSITGLYETRIDLSQLGGDGGGSAAAKRSWSMAA

SEQ ID NO: 392 - protein, 1383 aa, Artificial Sequence
  Synthetic: Amino acid sequence for Cas9 with NLS7
MDKKYSIGLDIGTNSVGWAVITDEYKVPSKKFKVLGNTDRHSIKKNLIGALLFDSGETAEATRLKRTARRRYTRRKNRICYLQEIFSNEMAKVDDSFFHRLEESFLVEEDKKHERHPIFGNIVDEVAYHEKYPTIYHLRKKLVDSTDKADLRLIYLALAHMIKFRGHFLIEGDLNPDNSDVDKLFIQLVQTYNQLFEENPINASGVDAKAILSARLSKSRRLENLIAQLPGEKKNGLFGNLIALSLGLTPNFKSNFDLAEDAKLQLSKDTYDDDLDNLLAQIGDQYADLFLAAKNLSDAILLSDILRVNTEITKAPLSASMIKRYDEHHQDLTLLKALVRQQLPEKYKEIFFDQSKNGYAGYIDGGASQEEFYKFIKPILEKMDGTEELLVKLNREDLLRKQRTFDNGSIPHQIHLGELHAILRRQEDFYPFLKDNREKIEKILTFRIPYYVGPLARGNSRFAWMTRKSEETITPWNFEEVVDKGASAQSFIERMTNFDKNLPNEKVLPKHSLLYEYFTVYNELTKVKYVTEGMRKPAFLSGEQKKAIVDLLFKTNRKVTVKQLKEDYFKKIECFDSVEISGVEDRFNASLGTYHDLLKIIKDKDFLDNEENEDILEDIVLTLTLFEDREMIEERLKTYAHLFDDKVMKQLKRRRYTGWGRLSRKLINGIRDKQSGKTILDFLKSDGFANRNFMQLIHDDSLTFKEDIQKAQVSGQGDSLHEHIANLAGSPAIKKGILQTVKVVDELVKVMGRHKPENIVIEMARENQTTQKGQKNSRERMKRIEEGIKELGSQILKEHPVENTQLQNEKLYLYYLQNGRDMYVDQELDINRLSDYDVDHIVPQSFLKDDSIDNKVLTRSDKNRGKSDNVPSEEVVKKMKNYWRQLLNAKLITQRKFDNLTKAERGGLSELDKAGFIKRQLVETRQITKHVAQILDSRMNTKYDENDKLIREVKVITLKSKLVSDFRKDFQFYKVREINNYHHAHDAYLNAVVGTALIKKYPKLESEFVYGDYKVYDVRKMIAKSEQEIGKATAKYFFYSNIMNFFKTEITLANGEIRKRPLIETNGETGEIVWDKGRDFATVRKVLSMPQVNIVKKTEVQTGGFSKESILPKRNSDKLIARKKDWDPKKYGGFDSPTVAYSVLVVAKVEKGKSKKLKSVKELLGITIMERSSFEKNPIDFLEAKGYKEVKKDLIIKLPKYSLFELENGRKRMLASAGELQKGNELALPSKYVNFLYLASHYEKLKGSPEDNEQKQLFVEQHKHYLDEIIEQISEFSKRVILADANLDKVLSAYNKHRDKPIREQAENIIHLFTLTNLGAPAAFKYFDTTIDRKRYTSTKEVLDATLIHQSITGLYETRIDLSQLGGDGGGSAAAKRVWSMAF

SEQ ID NO: 393 - protein, 1383 aa, Artificial Sequence
  Synthetic: Amino acid sequence for Cas9 with NLS8
MDKKYSIGLDIGTNSVGWAVITDEYKVPSKKFKVLGNTDRHSIKKNLIGALLFDSGETAEATRLKRTARRRYTRRKNRICYLQEIFSNEMAKVDDSFFHRLEESFLVEEDKKHERHPIFGNIVDEVAYHEKYPTIYHLRKKLVDSTDKADLRLIYLALAHMIKFRGHFLIEGDLNPDNSDVDKLFIQLVQTYNQLFEENPINASGVDAKAILSARLSKSRRLENLIAQLPGEKKNGLFGNLIALSLGLTPNFKSNFDLAEDAKLQLSKDTYDDDLDNLLAQIGDQYADLFLAAKNLSDAILLSDILRVNTEITKAPLSASMIKRYDEHHQDLTLLKALVRQQLPEKYKEIFFDQSKNGYAGYIDGGASQEEFYKFIKPILEKMDGTEELLVKLNREDLLRKQRTFDNGSIPHQIHLGELHAILRRQEDFYPFLKDNREKIEKILTFRIPYYVGPLARGNSRFAWMTRKSEETITPWNFEEVVDKGASAQSFIERMTNFDKNLPNEKVLPKHSLLYEYFTVYNELTKVKYVTEGMRKPAFLSGEQKKAIVDLLFKTNRKVTVKQLKEDYFKKIECFDSVEISGVEDRFNASLGTYHDLLKIIKDKDFLDNEENEDILEDIVLTLTLFEDREMIEERLKTYAHLFDDKVMKQLKRRRYTGWGRLSRKLINGIRDKQSGKTILDFLKSDGFANRNFMQLIHDDSLTFKEDIQKAQVSGQGDSLHEHIANLAGSPAIKKGILQTVKVVDELVKVMGRHKPENIVIEMARENQTTQKGQKNSRERMKRIEEGIKELGSQILKEHPVENTQLQNEKLYLYYLQNGRDMYVDQELDINRLSDYDVDHIVPQSFLKDDSIDNKVLTRSDKNRGKSDNVPSEEVVKKMKNYWRQLLNAKLITQRKFDNLTKAERGGLSELDKAGFIKRQLVETRQITKHVAQILDSRMNTKYDENDKLIREVKVITLKSKLVSDFRKDFQFYKVREINNYHHAHDAYLNAVVGTALIKKYPKLESEFVYGDYKVYDVRKMIAKSEQEIGKATAKYFFYSNIMNFFKTEITLANGEIRKRPLIETNGETGEIVWDKGRDFATVRKVLSMPQVNIVKKTEVQTGGFSKESILPKRNSDKLIARKKDWDPKKYGGFDSPTVAYSVLVVAKVEKGKSKKLKSVKELLGITIMERSSFEKNPIDFLEAKGYKEVKKDLIIKLPKYSLFELENGRKRMLASAGELQKGNELALPSKYVNFLYLASHYEKLKGSPEDNEQKQLFVEQHKHYLDEIIEQISEFSKRVILADANLDKVLSAYNKHRDKPIREQAENIIHLFTLTNLGAPAAFKYFDTTIDRKRYTSTKEVLDATLIHQSITGLYETRIDLSQLGGDGGGSAAAKRSWSMAF

SEQ ID NO: 394 - protein, 1382 aa, Artificial Sequence
  Synthetic: Amino acid sequence for Cas9 with NLS9
MDKKYSIGLDIGTNSVGWAVITDEYKVPSKKFKVLGNTDRHSIKKNLIGALLFDSGETAEATRLKRTARRRYTRRKNRICYLQEIFSNEMAKVDDSFFHRLEESFLVEEDKKHERHPIFGNIVDEVAYHEKYPTIYHLRKKLVDSTDKADLRLIYLALAHMIKFRGHFLIEGDLNPDNSDVDKLFIQLVQTYNQLFEENPINASGVDAKAILSARLSKSRRLENLIAQLPGEKKNGLFGNLIALSLGLTPNFKSNFDLAEDAKLQLSKDTYDDDLDNLLAQIGDQYADLFLAAKNLSDAILLSDILRVNTEITKAPLSASMIKRYDEHHQDLTLLKALVRQQLPEKYKEIFFDQSKNGYAGYIDGGASQEEFYKFIKPILEKMDGTEELLVKLNREDLLRKQRTFDNGSIPHQIHLGELHAILRRQEDFYPFLKDNREKIEKILTFRIPYYVGPLARGNSRFAWMTRKSEETITPWNFEEVVDKGASAQSFIERMTNFDKNLPNEKVLPKHSLLYEYFTVYNELTKVKYVTEGMRKPAFLSGEQKKAIVDLLFKTNRKVTVKQLKEDYFKKIECFDSVEISGVEDRFNASLGTYHDLLKIIKDKDFLDNEENEDILEDIVLTLTLFEDREMIEERLKTYAHLFDDKVMKQLKRRRYTGWGRLSRKLINGIRDKQSGKTILDFLKSDGFANRNFMQLIHDDSLTFKEDIQKAQVSGQGDSLHEHIANLAGSPAIKKGILQTVKVVDELVKVMGRHKPENIVIEMARENQTTQKGQKNSRERMKRIEEGIKELGSQILKEHPVENTQLQNEKLYLYYLQNGRDMYVDQELDINRLSDYDVDHIVPQSFLKDDSIDNKVLTRSDKNRGKSDNVPSEEVVKKMKNYWRQLLNAKLITQRKFDNLTKAERGGLSELDKAGFIKRQLVETRQITKHVAQILDSRMNTKYDENDKLIREVKVITLKSKLVSDFRKDFQFYKVREINNYHHAHDAYLNAVVGTALIKKYPKLESEFVYGDYKVYDVRKMIAKSEQEIGKATAKYFFYSNIMNFFKTEITLANGEIRKRPLIETNGETGEIVWDKGRDFATVRKVLSMPQVNIVKKTEVQTGGFSKESILPKRNSDKLIARKKDWDPKKYGGFDSPTVAYSVLVVAKVEKGKSKKLKSVKELLGITIMERSSFEKNPIDFLEAKGYKEVKKDLIIKLPKYSLFELENGRKRMLASAGELQKGNELALPSKYVNFLYLASHYEKLKGSPEDNEQKQLFVEQHKHYLDEIIEQISEFSKRVILADANLDKVLSAYNKHRDKPIREQAENIIHLFTLTNLGAPAAFKYFDTTIDRKRYTSTKEVLDATLIHQSITGLYETRIDLSQLGGDGGGSAAAKRKYFAA

SEQ ID NO: 395 - protein, 1382 aa, Artificial Sequence
  Synthetic: Amino acid sequence for Cas9 with NLS10
MDKKYSIGLDIGTNSVGWAVITDEYKVPSKKFKVLGNTDRHSIKKNLIGALLFDSGETAEATRLKRTARRRYTRRKNRICYLQEIFSNEMAKVDDSFFHRLEESFLVEEDKKHERHPIFGNIVDEVAYHEKYPTIYHLRKKLVDSTDKADLRLIYLALAHMIKFRGHFLIEGDLNPDNSDVDKLFIQLVQTYNQLFEENPINASGVDAKAILSARLSKSRRLENLIAQLPGEKKNGLFGNLIALSLGLTPNFKSNFDLAEDAKLQLSKDTYDDDLDNLLAQIGDQYADLFLAAKNLSDAILLSDILRVNTEITKAPLSASMIKRYDEHHQDLTLLKALVRQQLPEKYKEIFFDQSKNGYAGYIDGGASQEEFYKFIKPILEKMDGTEELLVKLNREDLLRKQRTFDNGSIPHQIHLGELHAILRRQEDFYPFLKDNREKIEKILTFRIPYYVGPLARGNSRFAWMTRKSEETITPWNFEEVVDKGASAQSFIERMTNFDKNLPNEKVLPKHSLLYEYFTVYNELTKVKYVTEGMRKPAFLSGEQKKAIVDLLFKTNRKVTVKQLKEDYFKKIECFDSVEISGVEDRFNASLGTYHDLLKIIKDKDFLDNEENEDILEDIVLTLTLFEDREMIEERLKTYAHLFDDKVMKQLKRRRYTGWGRLSRKLINGIRDKQSGKTILDFLKSDGFANRNFMQLIHDDSLTFKEDIQKAQVSGQGDSLHEHIANLAGSPAIKKGILQTVKVVDELVKVMGRHKPENIVIEMARENQTTQKGQKNSRERMKRIEEGIKELGSQILKEHPVENTQLQNEKLYLYYLQNGRDMYVDQELDINRLSDYDVDHIVPQSFLKDDSIDNKVLTRSDKNRGKSDNVPSEEVVKKMKNYWRQLLNAKLITQRKFDNLTKAERGGLSELDKAGFIKRQLVETRQITKHVAQILDSRMNTKYDENDKLIREVKVITLKSKLVSDFRKDFQFYKVREINNYHHAHDAYLNAVVGTALIKKYPKLESEFVYGDYKVYDVRKMIAKSEQEIGKATAKYFFYSNIMNFFKTEITLANGEIRKRPLIETNGETGEIVWDKGRDFATVRKVLSMPQVNIVKKTEVQTGGFSKESILPKRNSDKLIARKKDWDPKKYGGFDSPTVAYSVLVVAKVEKGKSKKLKSVKELLGITIMERSSFEKNPIDFLEAKGYKEVKKDLIIKLPKYSLFELENGRKRMLASAGELQKGNELALPSKYVNFLYLASHYEKLKGSPEDNEQKQLFVEQHKHYLDEIIEQISEFSKRVILADANLDKVLSAYNKHRDKPIREQAENIIHLFTLTNLGAPAAFKYFDTTIDRKRYTSTKEVLDATLIHQSITGLYETRIDLSQLGGDGGGSRAAKRKAFAA

SEQ ID NO: 396 - protein, 1382 aa, Artificial Sequence
  Synthetic: Amino acid sequence for Cas9 with NLS11
MDKKYSIGLDIGTNSVGWAVITDEYKVPSKKFKVLGNTDRHSIKKNLIGALLFDSGETAEATRLKRTARRRYTRRKNRICYLQEIFSNEMAKVDDSFFHRLEESFLVEEDKKHERHPIFGNIVDEVAYHEKYPTIYHLRKKLVDSTDKADLRLIYLALAHMIKFRGHFLIEGDLNPDNSDVDKLFIQLVQTYNQLFEENPINASGVDAKAILSARLSKSRRLENLIAQLPGEKKNGLFGNLIALSLGLTPNFKSNFDLAEDAKLQLSKDTYDDDLDNLLAQIGDQYADLFLAAKNLSDAILLSDILRVNTEITKAPLSASMIKRYDEHHQDLTLLKALVRQQLPEKYKEIFFDQSKNGYAGYIDGGASQEEFYKFIKPILEKMDGTEELLVKLNREDLLRKQRTFDNGSIPHQIHLGELHAILRRQEDFYPFLKDNREKIEKILTFRIPYYVGPLARGNSRFAWMTRKSEETITPWNFEEVVDKGASAQSFIERMTNFDKNLPNEKVLPKHSLLYEYFTVYNELTKVKYVTEGMRKPAFLSGEQKKAIVDLLFKTNRKVTVKQLKEDYFKKIECFDSVEISGVEDRFNASLGTYHDLLKIIKDKDFLDNEENEDILEDIVLTLTLFEDREMIEERLKTYAHLFDDKVMKQLKRRRYTGWGRLSRKLINGIRDKQSGKTILDFLKSDGFANRNFMQLIHDDSLTFKEDIQKAQVSGQGDSLHEHIANLAGSPAIKKGILQTVKVVDELVKVMGRHKPENIVIEMARENQTTQKGQKNSRERMKRIEEGIKELGSQILKEHPVENTQLQNEKLYLYYLQNGRDMYVDQELDINRLSDYDVDHIVPQSFLKDDSIDNKVLTRSDKNRGKSDNVPSEEVVKKMKNYWRQLLNAKLITQRKFDNLTKAERGGLSELDKAGFIKRQLVETRQITKHVAQILDSRMNTKYDENDKLIREVKVITLKSKLVSDFRKDFQFYKVREINNYHHAHDAYLNAVVGTALIKKYPKLESEFVYGDYKVYDVRKMIAKSEQEIGKATAKYFFYSNIMNFFKTEITLANGEIRKRPLIETNGETGEIVWDKGRDFATVRKVLSMPQVNIVKKTEVQTGGFSKESILPKRNSDKLIARKKDWDPKKYGGFDSPTVAYSVLVVAKVEKGKSKKLKSVKELLGITIMERSSFEKNPIDFLEAKGYKEVKKDLIIKLPKYSLFELENGRKRMLASAGELQKGNELALPSKYVNFLYLASHYEKLKGSPEDNEQKQLFVEQHKHYLDEIIEQISEFSKRVILADANLDKVLSAYNKHRDKPIREQAENIIHLFTLTNLGAPAAFKYFDTTIDRKRYTSTKEVLDATLIHQSITGLYETRIDLSQLGGDGGGSRAAKRKYFAV
